(19) United States
(12) Patent Application Publication
(10) Pub. No.: US 2023/0416743 A1
(43) Pub. Date: Dec. 28, 2023

(54) COMPOSITIONS AND METHODS FOR INHIBITING SNCA EXPRESSION

(71) Applicant: Dicerna Pharmaceuticals, Inc., Lexington, MA (US)

(72) Inventors: Bob Dale BROWN, Littleton, MA (US); Henryk T. DUDEK, Belmont, MA (US); Seongmoon CHEONG, Harvard, MA (US); Shiyu WANG, Belmont, MA (US); Travis GRIM, Maynard, MA (US); Matthew Guese COSTALES, Lexington, MA (US); Maire JUNG, Lincoln, MA (US)

(21) Appl. No.: 18/316,561

(22) Filed: May 12, 2023

Related U.S. Application Data
(60) Provisional application No. 63/364,639, filed on May 13, 2022.

(51) Int. Cl. C12N 15/113

(52) U.S. Cl. CPC C12N 15/113; C12N 2310/321; C12N 2310/322; C12N 2310/14; C12N 2310/315; C12N 2310/351; C12N 2310/3515; C12N 2310/531

(57) ABSTRACT

Oligonucleotides (e.g., RNAi oligonucleotides) are provided herein that inhibit SNCA gene expression, including oligonucleotides conjugated to a targeting ligand (e.g., GalNAC moiety or lipid moiety). Also provided are compositions including the same and uses thereof, particularly uses relating to treating diseases, disorders, and/or conditions associated with SNCA gene expression.

### CROSS-REFERENCE TO RELATED APPLICATIONS

[0001] The present application claims priority under 35 U.S.C. § 119(e) from U.S. Provisional Application No. 63/364,639, filed May 13, 2022, which is incorporated herein by reference in its entirety.

### TECHNICAL FIELD

[0002] The disclosure relates generally to biology and medicine, and more particularly it relates to oligonucleotides and compositions including the same for inhibiting or reducing (i.e., modulating) alpha-synuclein (SNCA) gene expression, as well as their use for treating diseases and disorders associated with SNCA gene expression.

### BACKGROUND

[0003] Synapses are functional compartment between cells where information is passed from one cell to another in the brain. SNCA is a protein primarily found in the brain which regulates synaptic vesicle trafficking and release of neurotransmitters. Among other functions, SNCA acts as a molecular chaperone to assist in folding synaptic fusion components (e.g., SNAREs). Mutations (e.g., insertions and mismatches) in SNCA that alter SNCA function and expression or general aberrant expression of SNCA are known causes of several diseases impacting the CNS (e.g., Parkinson's disease and multiple system atrophy). Strategies for targeting the SNCA gene to prevent such diseases are needed.

[0004] The mammalian CNS is a complex system of tissues, including cells, fluids and chemicals that interact in concert to enable a wide variety of functions, including movement, navigation, cognition, speech, vision, and emotion. Unfortunately, a variety of diseases and disorders of the CNS are known (e.g., neurological disorders) and affect or disrupt some or all of these functions. Typically, treatments for diseases and disorders of the CNS have been limited to small molecule drugs, antibodies and/or to adaptive or behavioral therapies. There exists an ongoing need to develop treatment of diseases and disorders of the CNS associated with inappropriate gene expression.

### SUMMARY OF DISCLOSURE

[0005] To address this need, the disclosure describes compositions for and methods of treating a disease, disorder, or condition associated with SNCA gene expression. The present disclosure is based, at least in part, on discovering RNAi oligonucleotides that effectively target and reduce SNCA gene expression in tissues of the CNS. Specifically, target sequences within SNCA mRNA were identified and oligonucleotides that bind to these target sequences and inhibiting SNCA mRNA expression were generated. As demonstrated herein, the oligonucleotides inhibited human and non-human primate (NHP) SNCA gene expression in CNS tissue. Further, SNCA mRNA expression was reduced in CNS tissue associated with Parkinson's disease or multiple system atrophy lipid-conjugated SNCA-targeting oligonucleotides. Without being bound by theory, the oligonucleotides described herein are useful for treating a disease, disorder, or condition associated with SNCA gene expression.

[0006] Accordingly, in some aspects, the disclosure provides a RNAi oligonucleotide for reducing SNCA gene expression, the oligonucleotide comprising a sense strand and an antisense strand, wherein the sense strand and the antisense strand form a duplex region, wherein the antisense strand comprises a region of complementarity to a SNCA mRNA target sequence of any one of SEQ ID NOs: 1683-2066, and wherein the region of complementarity is at least about 15 contiguous nucleotides in length.

[0007] In any of the foregoing or related aspects, the sense strand is about 15 to about 50 nucleotides in length. In some aspects, the sense strand is about 18 to about 36 nucleotides in length. In some aspects, the antisense strand is about 15 to about 30 nucleotides in length. In some aspects, the antisense strand is 22 nucleotides in length, and the antisense strand and the sense strand form a duplex region of at least 19 nucleotides in length, optionally at least 20 nucleotides in length. In some aspects, the region of complementarity is at least 19 contiguous nucleotides in length. In some aspects, the region of complementarity is at least 20 contiguous nucleotides in length.

[0008] In other aspects, the disclosure provides a double-stranded (ds) RNAi oligonucleotide for reducing SNCA gene expression, the oligonucleotide comprising:
[0009] (i) an antisense strand of 19-30 nucleotides in length, wherein the antisense strand comprises a nucleotide sequence comprising a region of complementarity to a SNCA mRNA target sequence, wherein the region of complementarity is selected from SEQ ID NOs: 2067-2450, and
[0010] (ii) a sense strand of 19-50 nucleotides in length comprising a region of complementarity to the antisense strand, wherein the antisense and sense strands are separate strands which form an asymmetric duplex region having an overhang of 1-4 nucleotides at the 3′ terminus of the antisense strand.

[0011] In some aspects, the 3′ end of the sense strand comprises a stem-loop set forth as S1-L-S2, wherein S1 is complementary to S2, and wherein L forms a loop between S1 and S2 of 3-5 nucleotides in length. In some aspects, L is a triloop or a tetraloop. In some aspects, L is a tetraloop. In some aspects, the tetraloop comprises the sequence 5′-GAAA-3′. In some aspects, the S1 and S2 are 1-10 nucleotides in length and have the same length. In some aspects, S1 and S2 are 1 nucleotide, 2 nucleotides, 3 nucleotides, 4 nucleotides, 5 nucleotides, 6 nucleotides, 7 nucleotides, 8 nucleotides, 9 nucleotides, or 10 nucleotides in length. In some aspects, S1 and S2 are 6 nucleotides in length. In some aspects, the stem-loop comprises the sequence 5′-GCAGCCGAAAGGCUGC-3′ (SEQ ID NO: 1680).

[0012] In other aspects, the oligonucleotides comprise a blunt end. In some aspects, the blunt end comprises the 3′ end of the sense strand. In some aspects, the sense strand is 20 to 22 nucleotides. In some aspects, the sense strand is 20 nucleotides.

[0013] In any of the foregoing or related aspects, the antisense strand comprises a 3′ overhang sequence of one or more nucleotides in length. In some aspects, the overhang comprises purine nucleotides. In some aspects, the 3′ overhang sequence is 2 nucleotides in length. In some aspects, the 3′ overhang is selected from AA, GG, AG, and GA. In some aspects, the overhang is GG or AA. In some aspects, the overhang is GG.

[0014] In any of the foregoing or related aspects, the oligonucleotide comprises at least one modified nucleotide. In some aspects, the modified nucleotide comprises a 2′-modification. In some aspects, the 2′-modification is a modification selected from 2′-aminoethyl, 2′-fluoro (2′-F), 2′-O-methyl (2′-OMe), 2′-O-methoxyethyl, and 2′-deoxy-2′-fluoro-β-d-arabinonucleic acid. In some aspects, the modification is a 2′-modification selected from 2′-F and 2′-OMe. In some aspects, about 18% to about 23%, or 18%, 19%, 20%, 21%, 22% or 23%, of the nucleotides of the sense strand comprise a 2′-F modification. In some aspects, about 38-43%, 38%, 39%, 40%, 41%, 42% or 43% of the nucleotides of the sense strand comprise a 2′-F modification. In some aspects, about 25% to about 35%, or 25%, 26%, 27%, 28%, 29%, 30%, 31%, 32%, 33%, 34% or 35%, of the nucleotides of the antisense strand comprise a 2′-F modification. In some aspects, about 25% to about 35%, or 25%, 26%, 27%, 28%, 29%, 30%, 31%, 32%, 33%, 34% or 35%, of the nucleotides of the oligonucleotide comprise a 2′-F modification. In some aspects, about 35% to about 45%, or 35%, 36%, 37%, 38%, 39%, 40%, 41%, 42%, 43%, 44% or 45%, of the nucleotides of the oligonucleotide comprise a 2′-F modification. In some aspects, the sense strand comprises 36 nucleotides with positions 1-36 from 5′ to 3′, wherein each of positions 3, 5, 8, 10, 12, 13, 15, and 17 comprise a 2′-F modification. In some aspects, the sense strand comprises 20 nucleotides with positions 1-20 from 5′ to 3′, wherein each of positions 3, 5, 8, 10, 12, 13, 15, and 17 comprise a 2′-F modification. In some aspects, the antisense strand comprises 22 nucleotides with positions 1-22 from 5′ to 3′, and wherein each of positions 2, 3, 4, 5, 7, 10 14, 16 and 19 comprise a 2′-F modification. In some aspects, the remaining nucleotides comprise a 2′-OMe modification.

[0015] In any of the foregoing or related aspects, the oligonucleotide comprises at least one modified internucleotide linkage. In some aspects, the at least one modified internucleotide linkage is a phosphorothioate linkage. In some aspects, the antisense strand comprises a phosphorothioate linkage (i) between positions 1 and 2, and between positions 2 and 3; or (ii) between positions 1 and 2, between positions 2 and 3, and between positions 3 and 4, wherein positions are numbered 1-4 from 5′ to 3′. In some aspects, the antisense strand is 22 nucleotides in length, and the antisense strand comprises a phosphorothioate linkage between positions 20 and 21 and between positions 21 and 22, wherein positions are numbered 1-22 from 5′ to 3′. In some aspects, the sense strand comprises a phosphorothioate linkage between positions 1 and 2, wherein positions are numbered 1-2 from 5′ to 3′. In some aspects, the sense strand is 20 nucleotides in length, and the sense strand comprises a phosphorothioate linkage between positions between positions 1 and 2, between positions 18 and 19 and between positions 19 and 20, wherein positions are numbered 1-20 from 5′ to 3′.

[0016] In any of the foregoing or related aspects, the 4′-carbon of the sugar of the 5′-nucleotide of the antisense strand comprises a phosphate analog. In some aspects, the phosphate analog is oxymethyl phosphonate, vinyl phosphonate or malonyl phosphonate, optionally wherein the phosphate analog is a 4′-phosphate analog comprising 4′-oxymethylphosphonate.

[0017] In any of the foregoing or related aspects, at least one nucleotide of the oligonucleotide is conjugated to one or more targeting ligands. In some aspects, each targeting ligand comprises a carbohydrate, amino sugar, lipid, cholesterol, or polypeptide. In some aspects, the stem-loop comprises one or more targeting ligands conjugated to one or more nucleotides of the stem-loop. In some aspects, the one or more targeting ligands is conjugated to one or more nucleotides of the loop. In some aspects, the loop comprises 4 nucleotides numbered 1-4 from 5′ to 3′, wherein nucleotides at positions 2, 3, and 4 each comprise one or more targeting ligands, wherein the targeting ligands are the same or different. In some aspects, each targeting ligand comprises a N-acetylgalactosamine (GalNAc) moiety. In some aspects, the GalNAc moiety is a monovalent GalNAc moiety, a bivalent GalNAc moiety, a trivalent GalNAc moiety or a tetravalent GalNAc moiety. In some aspects, up to 4 nucleotides of L of the stem-loop are each conjugated to a monovalent GalNAc moiety.

[0018] In other aspects, the one or more targeting ligands is a lipid moiety. In some aspects, the lipid moiety is conjugated to the 5′ terminal nucleotide of the sense strand. In some aspects, the lipid moiety is a hydrocarbon chain. In some aspects, the hydrocarbon chain is a C₈-C₃₀ hydrocarbon chain. In some aspects, the hydrocarbon chain is a C₁₆ hydrocarbon chain. In some aspects, the C₁₆ hydrocarbon chain is represented by:

[chemical structure]

In some aspects, the lipid moiety is conjugated to the 2′ carbon of the ribose ring of the 5′ terminal nucleotide.

[0019] In any of the foregoing or related aspects, the region of complementarity is fully complementary to the SNCA mRNA target sequence at nucleotide positions 2-8 of the antisense strand, wherein nucleotide positions are numbered 5′ to 3′. In some aspects, the region of complementarity is fully complementary to the SNCA mRNA target sequence at nucleotide positions 2-11 of the antisense strand, wherein nucleotide positions are numbered 5′ to 3′.

[0020] In any of the foregoing or related aspects, the sense strand comprises a nucleotide sequence of any one of SEQ ID NOs: 1537-1571 and 1681. In some aspects, the antisense strand comprises a nucleotide sequence of any one of SEQ ID NOs: 1572-1606. In some aspects, the sense strand and antisense strands comprise nucleotide sequences selected from the group consisting of:
[0021] a) SEQ ID NOs: 1537 and 1572, respectively;
[0022] b) SEQ ID NOs: 1538 and 1573, respectively;
[0023] c) SEQ ID NOs: 1539 and 1574, respectively;
[0024] d) SEQ ID NOs: 1540 and 1575, respectively;
[0025] e) SEQ ID NOs: 1541 and 1576, respectively;
[0026] f) SEQ ID NOs: 1542 and 1577, respectively;
[0027] g) SEQ ID NOs: 1543 and 1578, respectively;
[0028] h) SEQ ID NOs: 1544 and 1579, respectively;
[0029] i) SEQ ID NOs: 1545 and 1580, respectively;
[0030] j) SEQ ID NOs: 1546 and 1581, respectively;
[0031] k) SEQ ID NOs: 1547 and 1582, respectively;
[0032] l) SEQ ID NOs: 1548 and 1583, respectively;
[0033] m) SEQ ID NOs: 1549 and 1584, respectively;
[0034] n) SEQ ID NOs: 1550 and 1585, respectively;
[0035] o) SEQ ID NOs: 1551 and 1586, respectively;
[0036] p) SEQ ID NOs: 1552 and 1587, respectively;
[0037] q) SEQ ID NOs: 1553 and 1588, respectively;
[0038] r) SEQ ID NOs: 1554 and 1589, respectively;
[0039] s) SEQ ID NOs: 1555 and 1590, respectively;
[0040] t) SEQ ID NOs: 1556 and 1591, respectively;
[0041] u) SEQ ID NOs: 1557 and 1592, respectively;
[0042] v) SEQ ID NOs: 1558 and 1593, respectively;
[0043] w) SEQ ID NOs: 1559 and 1594, respectively;
[0044] x) SEQ ID NOs: 1560 and 1595, respectively;
[0045] y) SEQ ID NOs: 1561 and 1596, respectively;
[0046] z) SEQ ID NOs: 1562 and 1597, respectively;
[0047] aa) SEQ ID NOs: 1563 and 1598, respectively;
[0048] bb) SEQ ID NOs: 1564 and 1599, respectively;
[0049] cc) SEQ ID NOs: 1565 and 1600, respectively;
[0050] dd) SEQ ID NOs: 1566 and 1601, respectively;
[0051] ee) SEQ ID NOs: 1567 and 1602, respectively;
[0052] ff) SEQ ID NOs: 1568 and 1603, respectively;
[0053] gg) SEQ ID NOs: 1569 and 1604, respectively;
[0054] hh) SEQ ID NOs: 1570 and 1605, respectively;
[0055] ii) SEQ ID NOs: 1571 and 1606, respectively; and
[0056] jj) SEQ ID NOs: 1681 and 1586, respectively.

[0057] In some aspects, the sense strand and antisense strands comprise nucleotide sequences selected from the group consisting of:
[0058] a) SEQ ID NOs: 1540 and 1575, respectively;
[0059] b) SEQ ID NOs: 1544 and 1579, respectively;
[0060] c) SEQ ID NOs: 1546 and 1581, respectively;
[0061] d) SEQ ID NOs: 1551 and 1586, respectively;
[0062] e) SEQ ID NOs: 1552 and 1587, respectively;
[0063] f) SEQ ID NOs: 1553 and 1588, respectively;
[0064] g) SEQ ID NOs: 1558 and 1594, respectively;
[0065] h) SEQ ID NOs: 1560 and 1595, respectively;
[0066] i) SEQ ID NOs: 1564 and 1599, respectively;
[0067] j) SEQ ID NOs: 1565 and 1600, respectively;
[0068] k) SEQ ID NOs: 1566 and 1601, respectively;
[0069] l) SEQ ID NOs: 1570 and 1605, respectively; and
[0070] m) SEQ ID NOs: 1681 and 1586, respectively.

[0071] In some aspects, the sense strand and antisense strands comprise nucleotide sequences selected from the group consisting of:
[0072] a) SEQ ID NOs: 1553 and 1588, respectively;
[0073] b) SEQ ID NOs: 1560 and 1595, respectively;
[0074] c) SEQ ID NOs: 1564 and 1599, respectively;
[0075] d) SEQ ID NOs: 1551 and 1586, respectively;
[0076] e) SEQ ID NOs: 1570 and 1605, respectively; and,
[0077] f) SEQ ID NOs: 1681 and 1586, respectively.

[0078] In some aspects, the sense strand comprises the nucleotide sequence as set forth in SEQ ID NO: 1553, and the antisense strand comprises the nucleotide sequence as set forth in SEQ ID NO: 1588. In some aspects, the sense strand comprises the nucleotide sequence as set forth in SEQ ID NO: 1560, and the antisense strand comprises the nucleotide sequence as set forth in SEQ ID NO: 1595. In some aspects, the sense strand comprises the nucleotide sequence as set forth in SEQ ID NO: 1564, and the antisense strand comprises the nucleotide sequence as set forth in SEQ ID NO: 1599. In some aspects, the sense strand comprises the nucleotide sequence as set forth in SEQ ID NO: 1551, and the antisense strand comprises the nucleotide sequence as set forth in SEQ ID NO: 1586. In some aspects, the sense strand comprises the nucleotide sequence as set forth in SEQ ID NO: 1570, and the antisense strand comprises the nucleotide sequence as set forth in SEQ ID NO: 1605. In some aspects, the sense strand comprises the nucleotide sequence as set forth in SEQ ID NO: 1681, and the antisense strand comprises the nucleotide sequence as set forth in SEQ ID NO: 1586.

[0079] In any of the foregoing or related aspects, the antisense strand is 22 nucleotides in length. In some aspects, the antisense strand comprises a nucleotide sequence comprising the nucleotide sequence selected from SEQ ID NOs: 1588, 1595, 1599, 1586, and 1605. In some aspects, the sense strand is 36 nucleotides in length. In some aspects, the sense strand comprises a nucleotide sequence comprising the nucleotide sequence selected from SEQ ID NOs: 1865, 1721, 1847, 1846, and 1955. In some aspects, the sense strand comprises a nucleotide sequence selected from SEQ ID NOs: 1553, 1560, 1564, 1551, and 1570.

[0080] In any of the foregoing or related aspects, the sense strand comprises the nucleotide sequence of any one of SEQ ID NOs: 1607-1641, and 1682. In some aspects, the antisense strand comprises a nucleotide sequence of any one of SEQ ID NOs: 1642-1676.

[0081] In some aspects, the sense strand and antisense strands comprise nucleotide sequences selected from the group consisting of:
[0082] a) SEQ ID NOs: 1607 and 1642, respectively;
[0083] b) SEQ ID NOs: 1608 and 1643, respectively;
[0084] c) SEQ ID NOs: 1609 and 1644, respectively;
[0085] d) SEQ ID NOs: 1610 and 1645, respectively;
[0086] e) SEQ ID NOs: 1611 and 1646, respectively;
[0087] f) SEQ ID NOs: 1612 and 1647, respectively;
[0088] g) SEQ ID NOs: 1613 and 1648, respectively;
[0089] h) SEQ ID NOs: 1614 and 1649, respectively;
[0090] i) SEQ ID NOs: 1615 and 1650, respectively;
[0091] j) SEQ ID NOs: 1616 and 1651, respectively;
[0092] k) SEQ ID NOs: 1617 and 1652, respectively;
[0093] l) SEQ ID NOs: 1618 and 1653, respectively;
[0094] m) SEQ ID NOs: 1619 and 1654, respectively;
[0095] n) SEQ ID NOs: 1620 and 1655, respectively;
[0096] o) SEQ ID NOs: 1621 and 1656, respectively;
[0097] p) SEQ ID NOs: 1622 and 1657, respectively;
[0098] q) SEQ ID NOs: 1623 and 1658, respectively;
[0099] r) SEQ ID NOs: 1624 and 1659, respectively;
[0100] s) SEQ ID NOs: 1625 and 1660, respectively;
[0101] t) SEQ ID NOs: 1626 and 1661, respectively;
[0102] u) SEQ ID NOs: 1627 and 1662, respectively;
[0103] v) SEQ ID NOs: 1628 and 1663, respectively;
[0104] w) SEQ ID NOs: 1629 and 1664, respectively;
[0105] x) SEQ ID NOs: 1630 and 1665, respectively;
[0106] y) SEQ ID NOs: 1631 and 1666, respectively;
[0107] z) SEQ ID NOs: 1632 and 1667, respectively;
[0108] aa) SEQ ID NOs: 1633 and 1668, respectively;
[0109] bb) SEQ ID NOs: 1634 and 1669, respectively;
[0110] cc) SEQ ID NOs: 1635 and 1670, respectively;
[0111] dd) SEQ ID NOs: 1636 and 1671, respectively;
[0112] ee) SEQ ID NOs: 1637 and 1672, respectively;
[0113] ff) SEQ ID NOs: 1638 and 1673, respectively;
[0114] gg) SEQ ID NOs: 1639 and 1674, respectively;
[0115] hh) SEQ ID NOs: 1640 and 1675, respectively;
[0116] ii) SEQ ID NOs: 1641 and 1676, respectively; and,
[0117] jj) SEQ ID NOs: 1682 and 1656, respectively.

[0118] In some aspects, the sense strand and antisense strands comprise nucleotide sequences selected from the group consisting of:
[0119] a) SEQ ID NOs: 1610 and 1645, respectively;
[0120] b) SEQ ID NOs: 1614 and 1649, respectively;
[0121] c) SEQ ID NOs: 1616 and 1651, respectively;
[0122] d) SEQ ID NOs: 1621 and 1656, respectively;
[0123] e) SEQ ID NOs: 1622 and 1657, respectively;
[0124] f) SEQ ID NOs: 1623 and 1658, respectively;
[0125] g) SEQ ID NOs: 1629 and 1664, respectively;
[0126] h) SEQ ID NOs: 1630 and 1665, respectively;
[0127] i) SEQ ID NOs: 1634 and 1669, respectively;
[0128] j) SEQ ID NOs: 1635 and 1670, respectively;
[0129] k) SEQ ID NOs: 1636 and 1671, respectively;
[0130] l) SEQ ID NOs: 1640 and 1675, respectively; and,
[0131] m) SEQ ID NOs: 1682 and 1656, respectively.

[0132] In some aspects, the sense strand and antisense strands comprise nucleotide sequences selected from the group consisting of:
[0133] a) SEQ ID NOs: 1623 and 1658, respectively;
[0134] b) SEQ ID NOs: 1630 and 1665, respectively;
[0135] c) SEQ ID NOs: 1634 and 1669, respectively;
[0136] d) SEQ ID NOs: 1621 and 1656, respectively;
[0137] e) SEQ ID NOs: 1640 and 1675, respectively; and,
[0138] f) SEQ ID NOs: 1682 and 1656, respectively.

[0139] In some aspects, the sense strand comprises the nucleotide sequence as set forth in SEQ ID NO: 1623, and the antisense strand comprises the nucleotide sequence as set forth in SEQ ID NO: 1658. In some aspects, the sense strand comprises the nucleotide sequence as set forth in SEQ ID NO: 1630, and the antisense strand comprises the nucleotide sequence as set forth in SEQ ID NO: 1665. In some aspects, the sense strand comprises the nucleotide sequence as set forth in SEQ ID NO: 1634, and the antisense strand comprises the nucleotide sequence as set forth in SEQ ID NO: 1669. In some aspects, the sense strand comprises the nucleotide sequence as set forth in SEQ ID NO: 1621, and the antisense strand comprises the nucleotide sequence as set forth in SEQ ID NO: 1656. In some aspects, the sense strand comprises the nucleotide sequence as set forth in SEQ ID NO: 1640, and the antisense strand comprises the nucleotide sequence as set forth in SEQ ID NO: 1676. In some aspects, the sense strand comprises the nucleotide sequence as set forth in SEQ ID NO: 1682, and the antisense strand comprises the nucleotide sequence as set forth in SEQ ID NO: 1656.

[0140] In some aspects, the sense strand comprises the sequence and all of the modifications of 5′-[mCs][mA][fG][mC][fA][mG][mU][fG][mA][fU][mU][fG][fA][mA][fG][mU][fA][mU][mC][mA][mG][mC][mA][mG][mC][mC][mG][ademA-GalNAc][ademA-GalNAc][ademA-GalNAc][mG][mG][mC][mU][mG][mC]-3′ (SEQ ID NO: 1623), and wherein the antisense strand comprises the sequence and all of the modifications of 5′-[MePhosphonate-4O-mUs][fGs][fA][fU][fA][mC][fU][mU][mC][fA][mA][mU][mC][fA][mC][fU][mG][mC][fU][m Gs][mGs][mG]-3′ (SEQ ID NO: 1658), wherein mC, mA, mG, mU=2′-OMe ribonucleosides; fA, fC, fG, fU=2′-F ribonucleosides; s=phosphorothioate, and wherein ademA-GalNAc=

[chemical structure]

[0141] In some aspects, the sense strand comprises the sequence and all of the modifications of 5′-[mAs][mG][fA][mG][fC][mA][mA][fG][mU][fG][mA][fC][fA][mA][fA][mU][fG][mU][mU][mA][mG][mC][mA][mG][mC][mC][mG][ademA-GalNAc][ademA-GalNAc][ademA-GalNAc][mG][mG][mC][mU][mG][mC]-3′ (SEQ ID NO: 1630), and wherein the antisense strand comprises the sequence and all of the modifications of 5′-[MePhosphonate-4O-mUs][fAs][fA][fC][fA][mU][fU][mU][mG][fU][mC][mA][mC][fU][mU][fG][mC][mU][fC][m Us][mGs][mG]-3′ (SEQ ID NO: 1665), wherein mC, mA, mG, mU=2′-OMe ribonucleosides; fA, fC, fG, fU=2′-F ribonucleosides; s=phosphorothioate, and wherein ademA-GalNAc=

[chemical structure]

[0142] In some aspects, the sense strand comprises the sequence and all of the modifications of 5′-[mAs][mG][fU][mC][fA][mU][mG][fA][mC][fA][mU][fU][fU][mC][fU][mC][fA][mA][mA][mA][mG][mC][mA][mG][mC][mC][mG][ademA-GalNAc][ademA-GalNAc][ademA-GalNAc][mG][mG][mC][mU][mG][mC]-3′ (SEQ ID NO: 1634), and wherein the antisense strand comprises the sequence and all of the modifications of 5′-[MePhosphonate-4O-mUs][fUs][fU][fU][fG][mA][fG][mA][mA][fA][mU][mG][mU][fC][mA][fU][mG][mA][fC][m Us][mGs][mG]-3′ (SEQ ID NO: 1669), wherein mC, mA, mG, mU=2′-OMe ribonucleosides; fA, fC, fG, fU=2′-F ribonucleosides; s=phosphorothioate, and wherein ademA-GalNAc=

[chemical structure]

[0143] In some aspects, the sense strand comprises the sequence and all of the modifications of 5′-[mCs][mA][fG][mU][fC][mA][mU][fG][mA][fC][mA][fU][fU][mU][fC][mU][fC][mA][mA][mA][mG][mC][mA][mG][mC][mC][mG][ademA-GalNAc][ademA-GalNAc][ademA-GalNAc][mG][mG][mC][mU][mG][mC]-3′ (SEQ ID NO: 1621), and wherein the antisense strand comprises the sequence and all of the modifications of 5′-[MePhosphonate-4O-mUs][fUs][fU][fG][fA][mG][fA][mA][mA][fU][mG][mU][mC][fA][mU][fG][mA][mC][fU][m Gs][mGs][mG]-3′ (SEQ ID NO: 1656), wherein mC, mA, mG, mU=2′-OMe ribonucleosides; fA, fC, fG, fU=2′-F ribonucleosides; s=phosphorothioate, and wherein ademA-GalNAc=

[chemical structure]

[0144] In some aspects, the sense strand comprises the sequence and all of the modifications of 5′-[mAs][mG][fU][mU][fG][mU][mU][fA][mG][fU][mG][fA][fU][mU][fU][mG][fC][mU][mA][mA][mG][mC][mA][mG][mC][mC][mG][ademA-GalNAc][ademA-GalNAc][ademA-GalNAc][mG][mG][mC][mU][mG][mC]-3′ (SEQ ID NO: 1640), and wherein the antisense strand comprises the sequence and all of the modifications of 5′-[MePhosphonate-4O-mUs][fUs][fA][fG][fC][mA][fA][mA][mU][fC][mA][mC][mU][fA][mA][fC][mA][mA][fC][m Us][mGs][mG]-3′ (SEQ ID NO: 1675), wherein mC, mA, mG, mU=2′-OMe ribonucleosides; fA, fC, fG, fU=2′-F ribonucleosides; s=phosphorothioate, and wherein ademA-GalNAc=

[chemical structure]

[0145] In some aspects, the sense strand comprises the sequence and all of the modifications of 5′-[ademCs-C₁₆][mA][fG][mU][fC][mA][mU][fG][mA][fC][mA][fU][fU][mU][fC][mU][fC][mAs][mAs][mA]-3′ (SEQ ID NO: 1682), and wherein the antisense strand comprises the sequence and all of the modifications of 5′-[MePhosphonate-4O-mUs][fUs][fU][fG][fA][mG][fA][mA][mA][fU][mG][mU][mC][fA][mU][fG][mA][mC][fU][m Gs][mGs][mG]-3′ (SEQ ID NO: 1656), wherein mC, mA, mG, mU=2′-OMe ribonucleosides; fA, fC, fG, fU=2′-F ribonucleosides; s=phosphorothioate, and [ademCs-C₁₆]=

[chemical structure]

[0146] In some aspects, the disclosure provides a pharmaceutical composition comprising a RNAi oligonucleotide described herein, and a pharmaceutically acceptable carrier, delivery agent or excipient.

[0147] In other aspects, the disclosure provides a method for treating a subject having a disease, disorder, or condition associated with SNCA gene expression, the method comprising administering to the subject a therapeutically effective amount of a RNAi oligonucleotide described herein, or pharmaceutical composition thereof, thereby treating the subject.

[0148] In further aspects, the disclosure provides a method of delivering an oligonucleotide to a subject, the method comprising administering a pharmaceutical composition described herein to the subject.

[0149] In yet further aspects, the disclosure provides, a method for reducing SNCA gene expression in a cell, a population of cells or a subject, the method comprising the step of:
[0150] i. contacting the cell or the population of cells with a RNAi oligonucleotide or pharmaceutical composition described herein; or
[0151] ii. administering to the subject a RNAi oligonucleotide or pharmaceutical composition described herein.

[0152] In some aspects, reducing SNCA gene expression comprises reducing an amount or level of SNCA mRNA, an amount or level of SNCA protein, or both. In some aspects, the subject has a disease, disorder, or condition associated with SNCA gene expression. In some aspects, the disease, disorder, or condition associated with SNCA expression is multiple system atrophy, dementia with Lewy bodies, or Parkinson disease.

[0153] In any of the foregoing or related aspects, a RNAi oligonucleotide or pharmaceutical composition described herein SNCA gene expression is reduced in tissue of one or more regions of the CNS, wherein the tissue is associated with Parkinson disease. In some aspects, the tissue associated with Parkinson disease is selected from: putamen, midbrain tegmentum, substantia nigra, pons, and medulla. In some aspects, SNCA gene expression is reduced in tissue of one or more regions of the CNS, wherein the tissue is associated with multiple system atrophy. In some aspects, tissue associated with multiple system atrophy is selected from: caudate nuclease, putamen, midbrain tegmentum, substantia nigra, pons, cerebellar cortex, cerebellar white matter, medulla, cervical spinal cord, thoracic spinal cord, and lumbar spinal cord. In some aspects, SNCA gene expression is reduced in one or more regions of the CNS selected from: cervical spinal cord, thoracic spinal cord, lumbar spinal cord, frontal cortex, temporal cortex, cerebellum, midbrain, occipital cortex, parietal cortex, hippocampus, caudate nucleus, thalamus, brainstem, motor cortex, globus pallidus, midbrain tegmentum, substantia nigra, pons, cerebellar white matter, and cerebellar dentate nucleus. In some aspects, SNCA gene expression is reduced in one or more regions of the CNS selected from: cervical spinal cord, thoracic spinal cord, lumbar spinal cord, frontal cortex, temporal cortex, cerebellum, midbrain, occipital cortex, parietal cortex, hippocampus, caudate nucleus, thalamus, brainstem, motor cortex, globus pallidus, midbrain tegmentum, substantia nigra, pons, cerebellar white matter, cerebellar dentate nucleus, L1 dorsal root ganglion (DRG), L2 DRG, L3 DRG, L4 DRG, L5 DRG, L6 DRG, putamen, midbrain tegmentum, substantia nigra, pons, medulla, cerebellar cortex, and cerebellar white matter.

[0154] In any of the foregoing or related aspects, the RNAi oligonucleotide, or pharmaceutical composition, is administered in combination with a second composition or therapeutic agent.

[0155] In other aspects, the disclosure provides use of a RNAi oligonucleotide or pharmaceutical composition described herein, in the manufacture of a medicament for the treatment of a disease, disorder, or condition associated with SNCA gene expression.

[0156] In further aspects, the disclosure provides a RNAi oligonucleotide or pharmaceutical composition described herein for use, or adaptable for use, in the treatment of a disease, disorder, or condition associated with SNCA expression.

[0157] In some aspects, the disclosure provides a kit comprising an RNAi oligonucleotide described herein, an optional pharmaceutically acceptable carrier, and a package insert comprising instructions for administration to a subject having a disease, disorder or condition associated with SNCA expression.

[0158] In any of the foregoing or related aspects, the disease, disorder, or condition associated with SNCA gene expression is multiple system atrophy, dementia with Lewy bodies, and Parkinson disease.

### BRIEF DESCRIPTION OF THE FIGURES

[0159] FIGS. 1A and 1B provide graphs depicting the percent (%) of human SNCA mRNA remaining in the liver of mice exogenously expressing human SNCA (hydrodynamic injection model) after treatment with GalNAc-conjugated SNCA-targeting oligonucleotides. CD-1 mice were dosed subcutaneously with 3 mg/kg of the indicated GalNAc-conjugated SNCA-targeting oligonucleotide formulated in PBS. Three days post-dose mice were hydrodynamically injected (HDI) with a DNA plasmid encoding human SNCA. The level of human SNCA mRNA was determined from livers collected 24 hours later. Hs-Mf=construct is human and monkey SNCA specific. Hs-Mf-Mm=construct is human, monkey, and mouse SNCA specific. SNCA-291 was used as a benchmark control.

[0160] FIGS. 2A and 2B provide graphs depicting the dose response of GalNAc-conjugated SNCA oligonucleotides selected based on inhibitory efficacy shown in FIGS. 1A-1B. The percent (%) of SNCA mRNA remaining in liver tissue was measured in CD-1 HDI mice as described in FIGS. 1A-1B. Following injection with 0.3 mg/kg, 1.0 mg/kg, or 3 mg/kg of the indicated GalNAc-conjugated SNCA oligonucleotide, percent (%) mRNA remaining was determined in two cohorts, FIG. 2A and FIG. 2B. Hs-Mf=construct is human and monkey SNCA specific. Hs-Mf-Mm=construct is human, monkey, and mouse SNCA specific.

[0161] FIGS. 3A-3S provide graphs depicting the percent (%) of non-human primate (NHP; Mf) SNCA mRNA remaining in the CNS of NHPs after treatment with GalNAc-conjugated SNCA-targeting oligonucleotides. NHPs were dosed by intra cisterna magna (i.c.m) injection with 50 mg of the indicated GalNAc-conjugated SNCA-targeting oligonucleotide formulated in artificial cerebrospinal fluid (aCSF) on study days 0 and 7. The level of SNCA mRNA was determined relative to the percent (%) of SNCA mRNA remaining in aCSF treated animals. Central nervous tissues measured included frontal cortex (FIG. 3A), caudate nucleus (FIG. 3B), hippocampus (FIG. 3C), mid brain (FIG. 3D), parietal cortex (FIG. 3E), occipital cortex (FIG. 3F), thalamus (FIG. 3G), temporal cortex (FIG. 311), cerebellum (FIG. 31), brainstem (FIG. 3J), cervical spinal cord (FIG. 3K), thoracic spinal cord (FIG. 3L), lumbar spinal cord (FIG. 3M), L1 dorsal root ganglion (DRG) (FIG. 3N), L2 DRG (FIG. 3O), L3 DRG (FIG. 3P), L4 DRG (FIG. 3Q), L5 DRG (FIG. 3R), and L6 DRG (FIG. 3S). GaLXC=GalNAc-conjugated SNCA-targeting oligonucleotide.

[0162] FIGS. 4A-4B provide graphs depicting the percent (%) of non-human primate (NHP; Mf) SNCA mRNA remaining (FIG. 4A) and concentration of oligonucleotide (FIG. 4B) in NHP CNS tissue associated with Parkinson's disease. NHPs were intrathecally administered aCSF or SNCA-B15 conjugated to a C₁₆ lipid. Tissue was collected and analyzed 28 days after administration of the oligonucleotide.

[0163] FIGS. 5A-5B provide graphs depicting the percent (%) of non-human primate (NHP; Mf) SNCA mRNA remaining (FIG. 5A) and concentration of oligonucleotide (FIG. 5B) in NHP CNS tissue associated with Multiple Systems Atrophy. NHPs were intrathecally administered aCSF or SNCA-B15 conjugated to a C₁₆ lipid. Tissue was collected and analyzed 28 days after administration of the oligonucleotide.

### DETAILED DESCRIPTION

[0164] According to some aspects, the disclosure provides oligonucleotides that reduce SNCA gene expression in the CNS. In some embodiments, the oligonucleotides provided herein are designed to treat diseases associated with SNCA expression in the CNS. In other embodiments, the disclosure provides methods of treating a disease associated with SNCA expression by reducing SNCA gene expression in cells (e.g., cells of the CNS).

### Oligonucleotide Inhibitors of SNCA Expression

[0165] The disclosure provides, inter alia, oligonucleotides that inhibit SNCA gene expression (e.g., RNAi oligonucleotides). In some embodiments, an oligonucleotide that inhibits SNCA gene expression is targeted to a SNCA mRNA.

### SNCA Target Sequences

[0166] In some embodiments, an oligonucleotide herein (e.g., a RNAi oligonucleotide) is targeted to a target sequence comprising a SNCA mRNA. In some embodiments, the oligonucleotide described herein is targeted to a target sequence within a SNCA mRNA sequence.

[0167] In some embodiments, the oligonucleotide described herein corresponds to a target sequence within a SNCA mRNA sequence. In some embodiments, the oligonucleotide, or a portion, fragment, or strand thereof (e.g., an antisense strand or a guide strand of a ds RNAi oligonucleotide) binds or anneals to a target sequence comprising SNCA mRNA, thereby inhibiting SNCA gene expression.

[0168] In some embodiments, the oligonucleotide is targeted to a SNCA target sequence for the purpose of inhibiting SNCA gene expression in vivo. In some embodiments, the amount or extent of inhibition of SNCA gene expression by an oligonucleotide targeted to a SNCA target sequence correlates with the potency of the oligonucleotide. In some embodiments, the amount or extent of inhibition of SNCA gene expression by an oligonucleotide targeted to a SNCA target sequence correlates with the amount or extent of therapeutic benefit in a subject or patient having a disease, disorder, or condition associated with SNCA gene expression treated with the oligonucleotide.

[0169] Through examination of the nucleotide sequence of mRNAs encoding SNCA, including mRNAs of multiple different species (e.g., human, cynomolgus monkey, and mouse; see, e.g., Example 1) and as a result of in vitro and in vivo testing (see, e.g., Examples 2-5), it has been discovered that certain nucleotide sequences of SNCA mRNA are more amenable than others to oligonucleotide-based inhibition and are thus useful as target sequences for the oligonucleotides herein. In some embodiments, a sense strand of an oligonucleotide (e.g., a RNAi oligonucleotide) described herein comprises a SNCA target sequence. In some embodiments, a portion or region of the sense strand of a ds oligonucleotide described herein comprises a SNCA target sequence. In some embodiments, the SNCA target sequence comprises, or consists of, a nucleotide sequence of any one of SEQ ID NOs: 1683-2066. In some embodiments, the SNCA target sequence comprises, or consists of, a nucleotide sequence of any one of SEQ ID Nos: 1781, 1782, 1796, 1798, 1802, 1808, 1814, 1817, 1713, 1718, 1726, 1830, 1839, 1742, 1846, 1852, 1865, 1784, 1804, 1721, 1822, 1840, 1735, 1847, 1855, 1864, 1901, 1902, 1938, 1947, 1955, 1964, 1973, and 1978. In some embodiments, the SNCA target sequence comprises, or consists of, a nucleotide sequence of any one of SEQ ID Nos: 1798, 1817, 1718, 1846, 1852, 1865, 1804, 1721, 1847, 1855, 1864, and 1955. In some embodiments, a SNCA target sequence comprises, or consists of, a nucleotide sequence of any one of SEQ ID NOs: 1865, 1721, 1847, 1846, and 1955. In some embodiments, the SNCA target sequence comprises the nucleotide sequence set forth in SEQ ID NO: 1865. In some embodiments, the SNCA target sequence comprises the nucleotide sequence set forth in SEQ ID NO: 1721. In some embodiments, the SNCA target sequence comprises the nucleotide sequence set forth in SEQ ID NO: 1847. In some embodiments, the SNCA target sequence comprises the nucleotide sequence set forth in SEQ ID NO: 1846. In some embodiments, the SNCA target sequence comprises the nucleotide sequence set forth in SEQ ID NO: 1955.

### SNCA-Targeting Sequences

[0170] In some embodiments, an oligonucleotide herein has a region of complementarity to SNCA mRNA (e.g., within a target sequence of SNCA mRNA) for purposes of targeting the mRNA in cells and inhibiting its expression. In some embodiments, the oligonucleotide comprises a SNCA targeting sequence (e.g., an antisense strand or a guide strand of a ds oligonucleotide) having a region of complementarity that binds or anneals to the SNCA target sequence by complementary (Watson-Crick) base pairing. The targeting sequence or region of complementarity is generally of suitable length and base content to enable binding or annealing of the oligonucleotide (or a strand thereof) to a SNCA mRNA for purposes of inhibiting its expression. In some embodiments, the targeting sequence or region of complementarity is at least about 12, at least about 13, at least about 14, at least about 15, at least about 16, at least about 17, at least about 18, at least about 19, at least about 20, at least about 21, at least about 22, at least about 23, at least about 24, at least about 25, at least about 26, at least about 27, at least about 28, at least about 29, or at least about nucleotides in length. In some embodiments, the targeting sequence or region of complementarity is at least 12, at least 13, at least 14, at least 15, at least 16, at least 17, at least 18, at least 19, or at least 20 nucleotides. In some embodiments, the targeting sequence or region of complementarity is about 12 to about 30 (e.g., 12 to 30, 12 to 22, 15 to 25, 17 to 21, 18 to 27, 19 to 27, or 15 to 30) nucleotides in length. In some embodiments, the targeting sequence or region of complementarity is about 12, 13, 14, 15, 16, 17, 18, 19, 20, 21, 22, 23, 24, 25, 26, 27, 28, 29, or 30 nucleotides in length. In some embodiments, the targeting sequence or region of complementarity is 18 nucleotides in length. In some embodiments, the targeting sequence or region of complementarity is 19 nucleotides in length. In some embodiments, the targeting sequence or region of complementarity is 20 nucleotides in length. In some embodiments, the targeting sequence or region of complementarity is 21 nucleotides in length. In some embodiments, the targeting sequence or region of complementarity is 22 nucleotides in length. In some embodiments, the targeting sequence or region of complementarity is 23 nucleotides in length. In some embodiments, the targeting sequence or region of complementarity is 24 nucleotides in length. In some embodiments, the oligonucleotide comprises a targeting sequence or region of complementarity complementary to a sequence of any one of SEQ ID NOs: 1683-2066, and the targeting sequence or region of complementarity is 18 nucleotides in length. In some embodiments, the oligonucleotide comprises a targeting sequence or region of complementarity complementary to a sequence of any one of SEQ ID NOs: 1683-2066, and the targeting sequence or region of complementarity is 19 nucleotides in length. In some embodiments, the oligonucleotide comprises a targeting sequence or region of complementarity complementary to a sequence of any one of SEQ ID NOs: 1-384, and the targeting sequence or region of complementarity is 20 nucleotides in length. In some embodiments, the oligonucleotide comprises a targeting sequence or region of complementarity complementary to a sequence of any one of SEQ ID NOs: 1-384, and the targeting sequence or region of complementarity is 21 nucleotides in length. In some embodiments, the oligonucleotide comprises a targeting sequence or region of complementarity complementary to a sequence of any one of SEQ ID NOs: 1-384, and the targeting sequence or region of complementarity is 22 nucleotides in length. In some embodiments, the oligonucleotide comprises a targeting sequence or region of complementarity complementary to a sequence of any one of SEQ ID NOs: 1-384, and the targeting sequence or region of complementarity is 23 nucleotides in length. In some embodiments, the oligonucleotide comprises a targeting sequence or region of complementarity complementary to a sequence of any one of SEQ ID NOs: 1-384 and the targeting sequence or region of complementarity is 24 nucleotides in length.

[0171] In some embodiments, the oligonucleotide comprises a targeting sequence or a region of complementarity (e.g., an antisense strand or a guide strand of a ds oligonucleotide) that is fully complementary to a SNCA target sequence. In some embodiments, the targeting sequence or region of complementarity is partially complementary to a SNCA target sequence. In some embodiments, the oligonucleotide comprises a targeting sequence or region of complementarity that is fully complementary to a sequence of any one of SEQ ID NOs: 1683-2066. In some embodiments, the oligonucleotide comprises a targeting sequence or region of complementarity that is partially complementary to a sequence of any one of SEQ ID NOs: 1683-2066. In some embodiments, the oligonucleotide comprises a targeting sequence or region of complementarity that is fully complementary to a sequence of any one of SEQ ID NOs: 1781, 1782, 1796, 1798, 1802, 1808, 1814, 1817, 1713, 1718, 1726, 1830, 1839, 1742, 1846, 1852, 1865, 1784, 1804, 1721, 1822, 1840, 1735, 1847, 1855, 1864, 1901, 1902, 1938, 1947, 1955, 1964, 1973, and 1978. In some embodiments, the oligonucleotide comprises a targeting sequence or region of complementarity that is partially complementary to a sequence of any one of SEQ ID NOs: 1781, 1782, 1796, 1798, 1802, 1808, 1814, 1817, 1713, 1718, 1726, 1830, 1839, 1742, 1846, 1852, 1865, 1784, 1804, 1721, 1822, 1840, 1735, 1847, 1855, 1864, 1901, 1902, 1938, 1947, 1955, 1964, 1973, and 1978. In some embodiments, the oligonucleotide comprises a targeting sequence or region of complementarity that is fully complementary to a sequence of any one of SEQ ID NOs: 1798, 1817, 1718, 1846, 1852, 1865, 1804, 1721, 1847, 1855, 1864, and 1955. In some embodiments, the oligonucleotide comprises a targeting sequence or region of complementarity that is partially complementary to a sequence of any one of SEQ ID NOs: 1798, 1817, 1718, 1846, 1852, 1865, 1804, 1721, 1847, 1855, 1864, and 1955. In some embodiments, the oligonucleotide comprises a targeting sequence or region of complementarity that is fully complementary to a sequence of any one of SEQ ID NOs: 1865, 1721, 1847, 1846, and 1955. In some embodiments, the oligonucleotide comprises a targeting sequence or region of complementarity that is partially complementary to a sequence of any one of SEQ ID NOs: 1865, 1721, 1847, 1846, and 1955. In some embodiments, the oligonucleotide comprises a targeting sequence or region of complementarity that is fully complementary to the sequence set forth in SEQ ID NO: 1865. In some embodiments, the oligonucleotide comprises a targeting sequence or region of complementarity that is fully complementary to the sequence set forth in SEQ ID NO: 1721. In some embodiments, the oligonucleotide comprises a targeting sequence or region of complementarity that is fully complementary to the sequence set forth in SEQ ID NO: 1847. In some embodiments, the oligonucleotide comprises a targeting sequence or region of complementarity that is fully complementary to the sequence set forth in SEQ ID NO: 1846. In some embodiments, the oligonucleotide comprises a targeting sequence or region of complementarity that is fully complementary to the sequence set forth in SEQ ID NO: 1955. In some embodiments, the oligonucleotide comprises a targeting sequence or region of complementarity that is partially complementary to a sequence of any one of SEQ ID NOs: 1865. In some embodiments, the oligonucleotide comprises a targeting sequence or region of complementarity that is partially complementary to the sequence of SEQ ID NO: 1721. In some embodiments, the oligonucleotide comprises a targeting sequence or region of complementarity that is partially complementary to the sequence of SEQ ID NO: 1847. In some embodiments, the oligonucleotide comprises a targeting sequence or region of complementarity that is partially complementary to the sequence of SEQ ID NO: 1846. In some embodiments, the oligonucleotide comprises a targeting sequence or region of complementarity that is partially complementary to the sequence of SEQ ID NO: 1955.

[0172] In some embodiments, the oligonucleotide herein comprises a targeting sequence or region of complementarity that is complementary to a contiguous sequence of nucleotides comprising a SNCA mRNA, wherein the contiguous sequence of nucleotides is about 12 to about 30 nucleotides in length (e.g., 12 to 30, 12 to 28, 12 to 26, 12 to 24, 12 to 20, 12 to 18, 12 to 16, 14 to 22, 16 to 20, 18 to 20, or 18 to 19 nucleotides in length). In some embodiments, the oligonucleotide comprises a targeting sequence or region of complementarity that is complementary to a contiguous sequence of nucleotides comprising a SNCA mRNA, wherein the contiguous sequence of nucleotides is 10, 11, 12, 13, 14, 15, 16, 17, 18, 19, or 20 nucleotides in length. In some embodiments, the oligonucleotide comprises a targeting sequence or region of complementarity that is complementary to a contiguous sequence of nucleotides comprising a SNCA mRNA, wherein the contiguous sequence of nucleotides is 19 nucleotides in length. In some embodiments, the oligonucleotide comprises a targeting sequence or region of complementarity that is complementary to a contiguous sequence of nucleotides comprising a SNCA mRNA, wherein the contiguous sequence of nucleotides is 20 nucleotides in length.

[0173] In some embodiments, the oligonucleotide comprises a targeting sequence or a region of complementarity that is complementary to a contiguous sequence of nucleotides of any one of SEQ ID NOs: 1683-2066, optionally wherein the contiguous sequence of nucleotides is 19 nucleotides in length. In some embodiments, the oligonucleotide comprises a targeting sequence or a region of complementarity that is complementary to a contiguous sequence of nucleotides of any one of SEQ ID NOs: 1781, 1782, 1796, 1798, 1802, 1808, 1814, 1817, 1713, 1718, 1726, 1830, 1839, 1742, 1846, 1852, 1865, 1784, 1804, 1721, 1822, 1840, 1735, 1847, 1855, 1864, 1901, 1902, 1938, 1947, 1955, 1964, 1973, and 1978, optionally wherein the contiguous sequence of nucleotides is 19 nucleotides in length. In some embodiments, the oligonucleotide comprises a targeting sequence or a region of complementarity that is complementary to a contiguous sequence of nucleotides of any one of SEQ ID NOs: 1798, 1817, 1718, 1846, 1852, 1865, 1804, 1721, 1847, 1855, 1864, and 1955, optionally wherein the contiguous sequence of nucleotides is 19 nucleotides in length. In some embodiments, the oligonucleotide comprises a targeting sequence or a region of complementarity that is complementary to a contiguous sequence of nucleotides of SEQ ID NO: 1865, 1721, 1847, 1846, and 1955, optionally wherein the contiguous sequence of nucleotides is 19 nucleotides in length.

[0174] In some embodiments, the targeting sequence or region of complementarity of the oligonucleotide (e.g., a RNAi oligonucleotide) is complementary to contiguous nucleotides of a sequence as set forth in any one of SEQ ID NOs: 1683-2066 and spans the entire length of an antisense strand. In some embodiments, the targeting sequence or region of complementarity of the oligonucleotide is complementary to contiguous nucleotides of a sequence as set forth in any one of SEQ ID NOs: 1683-2066 and spans a portion of the entire length of an antisense strand. In some embodiments, the oligonucleotide comprises a region of complementarity (e.g., on an antisense strand of a ds oligonucleotide) that is at least partially (e.g., fully) complementary to a contiguous stretch of nucleotides spanning nucleotides 1-20 of a sequence as set forth in any one of SEQ ID NOs: 1683-2066. In some embodiments, the targeting sequence or region of complementarity of the oligonucleotide is complementary to contiguous nucleotides of a sequence as set forth in any one of SEQ ID NOs: 1-384 and spans the entire length of an antisense strand. In some embodiments, the region of complementarity of the oligonucleotide is complementary to contiguous nucleotides of a sequence as set forth in any one of SEQ ID NOs: 1-384 and spans a portion of the entire length of an antisense strand. In some embodiments, the oligonucleotide comprises a region of complementarity (e.g., on an antisense strand of a ds oligonucleotide) that is at least partially (e.g., fully) complementary to a contiguous stretch of nucleotides spanning nucleotides 1 to 19 of a sequence as set forth in any one of SEQ ID NOs: 1-384.

[0175] In some embodiments, the oligonucleotide comprises a targeting sequence or region of complementarity having one or more base pair (bp) mismatches with the corresponding SNCA target sequence. In some embodiments, the targeting sequence or region of complementarity may have up to about 1, up to about 2, up to about 3, up to about 4, up to about 5, etc. mismatches with the corresponding SNCA target sequence provided that the ability of the targeting sequence or region of complementarity to bind or anneal to the SNCA mRNA under appropriate hybridization conditions and/or the ability of the oligonucleotide to inhibit SNCA gene expression is maintained. Alternatively, in some embodiments, the targeting sequence or region of complementarity comprises no more than 1, no more than 2, no more than 3, no more than 4, or no more than 5 mismatches with the corresponding SNCA target sequence provided that the ability of the targeting sequence or region of complementarity to bind or anneal to the SNCA mRNA under appropriate hybridization conditions and/or the ability of the oligonucleotide to inhibit SNCA gene expression is maintained. In some embodiments, the oligonucleotide comprises a targeting sequence or region of complementarity having 1 mismatch with the corresponding target sequence. In some embodiments, the oligonucleotide comprises a targeting sequence or region of complementarity having 2 mismatches with the corresponding target sequence. In some embodiments, the oligonucleotide comprises a targeting sequence or region of complementarity having 3 mismatches with the corresponding target sequence. In some embodiments, the oligonucleotide comprises a targeting sequence or region of complementarity having 4 mismatches with the corresponding target sequence. In some embodiments, the oligonucleotide comprises a targeting sequence or region of complementarity having 5 mismatches with the corresponding target sequence. In some embodiments, the oligonucleotide comprises a targeting sequence or region of complementarity more than one mismatch (e.g., 2, 3, 4, 5, or more mismatches) with the corresponding target sequence, wherein at least 2 (e.g., all) of the mismatches are positioned consecutively (e.g., 2, 3, 4, 5, or more mismatches in a row), or wherein the mismatches are interspersed in any position throughout the targeting sequence or region of complementarity. In some embodiments, the oligonucleotide comprises a targeting sequence or region of complementarity more than one mismatch (e.g., 2, 3, 4, 5, or more mismatches) with the corresponding target sequence, wherein at least 2 (e.g., all) of the mismatches are positioned consecutively (e.g., 2, 3, 4, 5, or more mismatches in a row), or wherein at least one or more non-mismatched base pair is located between the mismatches, or a combination thereof.

[0176] In some embodiments, the oligonucleotide comprises a targeting sequence or a region of complementary that is complementary to a contiguous sequence of nucleotides of any one of SEQ ID NOs: 1683-2066, wherein the targeting sequence or region of complementarity may have up to about 1, up to about 2, up to about 3, up to about 4, up to about 5, etc. mismatches with the corresponding SNCA target sequence. In some embodiments, the oligonucleotide comprises a targeting sequence or a region of complementary that is complementary to a contiguous sequence of nucleotides of any one of SEQ ID NOs: 1683-2066, wherein the targeting sequence or region of complementarity may have no more than 1, no more than 2, no more than 3, no more than 4, or no more than 5 mismatches with the corresponding SNCA target sequence. In some embodiments, the oligonucleotide comprises a targeting sequence or a region of complementary that is complementary to a contiguous sequence of nucleotides of any one of SEQ ID NOs: 1781, 1782, 1796, 1798, 1802, 1808, 1814, 1817, 1713, 1718, 1726, 1830, 1839, 1742, 1846, 1852, 1865, 1784, 1804, 1721, 1822, 1840, 1735, 1847, 1855, 1864, 1901, 1902, 1938, 1947, 1955, 1964, 1973, and 1978, wherein the targeting sequence or region of complementarity may have up to about 1, up to about 2, up to about 3, up to about 4, up to about 5, etc. mismatches with the corresponding SNCA target sequence. In some embodiments, the oligonucleotide comprises a targeting sequence or a region of complementary that is complementary to a contiguous sequence of nucleotides of any one of SEQ ID NOs: 1781, 1782, 1796, 1798, 1802, 1808, 1814, 1817, 1713, 1718, 1726, 1830, 1839, 1742, 1846, 1852, 1865, 1784, 1804, 1721, 1822, 1840, 1735, 1847, 1855, 1864, 1901, 1902, 1938, 1947, 1955, 1964, 1973, and 1978, wherein the targeting sequence or region of complementarity may have no more than 1, no more than 2, no more than 3, no more than 4, or no more than 5 mismatches with the corresponding SNCA target sequence. In some embodiments, the oligonucleotide comprises a targeting sequence or a region of complementary that is complementary to a contiguous sequence of nucleotides of any one of SEQ ID NOs: 1798, 1817, 1718, 1846, 1852, 1865, 1804, 1721, 1847, 1855, 1864, and 1955, wherein the targeting sequence or region of complementarity may have up to about 1, up to about 2, up to about 3, up to about 4, up to about 5, etc. mismatches with the corresponding SNCA target sequence. In some embodiments, the oligonucleotide comprises a targeting sequence or a region of complementary that is complementary to a contiguous sequence of nucleotides of any one of SEQ ID NOs: 1798, 1817, 1718, 1846, 1852, 1865, 1804, 1721, 1847, 1855, 1864, and 1955, wherein the targeting sequence or region of complementarity may have no more than 1, no more than 2, no more than 3, no more than 4, or no more than 5 mismatches with the corresponding SNCA target sequence. In some embodiments, the oligonucleotide comprises a targeting sequence or a region of complementary that is complementary to a contiguous sequence of nucleotides of any one of SEQ ID NOs: 1865, 1721, 1847, 1846, and 1955, wherein the targeting sequence or region of complementarity may have up to about 1, up to about 2, up to about 3, up to about 4, up to about 5, etc. mismatches with the corresponding SNCA target sequence. In some embodiments, the oligonucleotide comprises a targeting sequence or a region of complementary that is complementary to a contiguous sequence of nucleotides of any one of SEQ ID NOs: 1865, 1721, 1847, 1846, and 1955, wherein the targeting sequence or region of complementarity may have no more than 1, no more than 2, no more than 3, no more than 4, or no more than 5 mismatches with the corresponding SNCA target sequence. In some embodiments, the oligonucleotide comprises a targeting sequence or a region of complementary that is complementary to a contiguous sequence of nucleotides of SEQ ID NO: 1865, wherein the targeting sequence or region of complementarity may have up to about 1, up to about 2, up to about 3, up to about 4, up to about 5, etc. mismatches with the corresponding SNCA target sequence. In some embodiments, the oligonucleotide comprises a targeting sequence or a region of complementary that is complementary to a contiguous sequence of nucleotides of SEQ ID NO: 1865, wherein the targeting sequence or region of complementarity may have no more than 1, no more than 2, no more than 3, no more than 4, or no more than 5 mismatches with the corresponding SNCA target sequence. In some embodiments, the oligonucleotide comprises a targeting sequence or a region of complementary that is complementary to a contiguous sequence of nucleotides of SEQ ID NO: 1721, wherein the targeting sequence or region of complementarity may have up to about 1, up to about 2, up to about 3, up to about 4, up to about 5, etc. mismatches with the corresponding SNCA target sequence. In some embodiments, the oligonucleotide comprises a targeting sequence or a region of complementary that is complementary to a contiguous sequence of nucleotides of SEQ ID NO: 1721, wherein the targeting sequence or region of complementarity may have no more than 1, no more than 2, no more than 3, no more than 4, or no more than 5 mismatches with the corresponding SNCA target sequence. In some embodiments, the oligonucleotide comprises a targeting sequence or a region of complementary that is complementary to a contiguous sequence of nucleotides of SEQ ID NO: 1847, wherein the targeting sequence or region of complementarity may have up to about 1, up to about 2, up to about 3, up to about 4, up to about 5, etc. mismatches with the corresponding SNCA target sequence. In some embodiments, the oligonucleotide comprises a targeting sequence or a region of complementary that is complementary to a contiguous sequence of nucleotides of SEQ ID NO: 1847, wherein the targeting sequence or region of complementarity may have no more than 1, no more than 2, no more than 3, no more than 4, or no more than 5 mismatches with the corresponding SNCA target sequence. In some embodiments, the oligonucleotide comprises a targeting sequence or a region of complementary that is complementary to a contiguous sequence of nucleotides of SEQ ID NO: 1846, wherein the targeting sequence or region of complementarity may have up to about 1, up to about 2, up to about 3, up to about 4, up to about 5, etc. mismatches with the corresponding SNCA target sequence. In some embodiments, the oligonucleotide comprises a targeting sequence or a region of complementary that is complementary to a contiguous sequence of nucleotides of SEQ ID NO: 1846, wherein the targeting sequence or region of complementarity may have no more than 1, no more than 2, no more than 3, no more than 4, or no more than 5 mismatches with the corresponding SNCA target sequence. In some embodiments, the oligonucleotide comprises a targeting sequence or a region of complementary that is complementary to a contiguous sequence of nucleotides of SEQ ID NO: 1955, wherein the targeting sequence or region of complementarity may have up to about 1, up to about 2, up to about 3, up to about 4, up to about 5, etc. mismatches with the corresponding SNCA target sequence. In some embodiments, the oligonucleotide comprises a targeting sequence or a region of complementary that is complementary to a contiguous sequence of nucleotides of SEQ ID NO: 1955, wherein the targeting sequence or region of complementarity may have no more than 1, no more than 2, no more than 3, no more than 4, or no more than 5 mismatches with the corresponding SNCA target sequence.

### Types of Oligonucleotides

[0177] A variety of oligonucleotide types and/or structures are useful for targeting SNCA mRNA in the methods herein including, but not limited to, RNAi oligonucleotides, antisense oligonucleotides, miRNAs, etc. Any of the oligonucleotide types described herein or elsewhere are contemplated for use as a framework to incorporate a SNCA mRNA targeting sequence herein for the purposes of inhibiting SNCA gene expression.

[0178] In some embodiments, the oligonucleotides herein inhibit SNCA gene expression by engaging with RNA interference (RNAi) pathways upstream or downstream of Dicer involvement (e.g., a RNAi oligonucleotide). For example, RNAi oligonucleotides have been developed with each strand having sizes of about 19 to about 25 nucleotides with at least one 3′ overhang of about 1 to about 5 nucleotides (see, e.g., U.S. Pat. No. 8,372,968). Longer oligonucleotides also have been developed that are processed by Dicer to generate active RNAi products (see, e.g., U.S. Pat. No. 8,883,996). Further work produced extended ds oligonucleotides where at least one end of at least one strand is extended beyond a duplex targeting region, including structures where one of the strands includes a thermodynamically stabilizing tetraloop structure (see, e.g., U.S. Pat. Nos. 8,513,207 and 8,927,705, as well as Intl. Patent Application Publication No. WO 2010/033225). Such structures may include single-stranded (ss) extensions (on one or both sides of the molecule) as well as ds extensions.

[0179] In some embodiments, the oligonucleotides engage with the RNAi pathway downstream of the involvement of Dicer (e.g., Dicer cleavage). In some embodiments, the oligonucleotide has an overhang (e.g., of 1, 2, or 3 nucleotides in length) in the 3′ end of the sense strand. In some embodiments, the oligonucleotide (e.g., siRNA) comprises a 21-nucleotide antisense strand that is antisense to a target mRNA (e.g., SNCA mRNA) and a complementary passenger sense strand, in which both strands anneal to form a 19-bp duplex and 2 nucleotide overhangs at either or both 3′ ends. Longer oligonucleotide designs also are contemplated including oligonucleotides having a antisense strand of 23 nucleotides and a passenger strand of 21 nucleotides, where there is a blunt end on the right side of the molecule (3′ end of sense strand/5′ end of antisense strand) and a two nucleotide 3′ antisense strand overhang on the left side of the molecule (5′ end of the sense strand/3′ end of the antisense strand). In such molecules, there is a 21-bp duplex region. See, e.g., U.S. Pat. Nos. 9,012,138; 9,012,621 and 9,193,753.

[0180] In some embodiments, the oligonucleotide herein comprises sense and antisense strands that are both in the range of about 17 to about 36 (e.g., 17 to 26, 20 to 25, or 21-23) nucleotides in length. In some embodiments, the oligonucleotide comprises an antisense strand of 19-30 nucleotides in length and a sense strand of 19-50 nucleotides in length, wherein the antisense and sense strands are separate strands that form an asymmetric duplex region having an overhang of 1-4 nucleotides at the 3′ terminus of the antisense strand. In some embodiments, the oligonucleotide comprises sense and antisense strands that are both in the range of about 19 to about 22 nucleotides in length. In some embodiments, the sense and antisense strands are of equal length. In some embodiments, the oligonucleotide comprises sense and antisense strands, such that there is a 3′ overhang on either the sense strand or the antisense strand, or both the sense and antisense strand. In some embodiments, for oligonucleotides that have sense and antisense strands that are both in the range of about 21-23 nucleotides in length, a 3′ overhang on the sense, antisense, or both strands is 1 or 2 nucleotides in length. In some embodiments, the oligonucleotide has an antisense strand of 22 nucleotides and a sense strand of 20 nucleotides, where there is a blunt end on the right side of the molecule (3′ end of sense strand/5′ end of antisense strand) and a 2 nucleotide 3′ antisense strand overhang on the left side of the molecule (5′ end of the sense strand/3′ end of the antisense strand). In such molecules, there is a 20-bp duplex region.

[0181] Other oligonucleotide designs for use with the compositions and methods herein include: 16-mer siRNAs (see, e.g., NUCLEIC ACIDS IN CHEMISTRY AND BIOLOGY, Blackburn (ed.), Royal Society of Chemistry, 2006), shRNAs (e.g., having 19 bp or shorter stems; see, e.g., Moore et al. (2010) METHODS MOL. BIOL. 629:141-58), blunt siRNAs (e.g., of 19 bps in length; see, e.g., Kraynack & Baker (2006) RNA 12:163-76), asymmetrical siRNAs (aiRNA; see, e.g., Sun et al. (2008) Nat. Biotechnol. 26:1379-82), asymmetric shorter-duplex siRNA (see, e.g., Chang et al. (2009) Mol. Ther. 17:725-732), fork siRNAs (see, e.g., Hohjoh (2004) FEBS Lett. 557:193-98), single-stranded siRNAs (Elsner (2012) Nat. Biotechnol. 30:1063), dumbbell-shaped circular siRNAs (see, e.g., Abe et al. (2007) J. Am. Chem. Soc. 129:15108-09), and small internally segmented interfering RNA (siRNA; see, e.g., Bramsen et al. (2007) Nucleic Acids Res. 35:5886-97). Further non-limiting examples of an oligonucleotide designs that may be used in some embodiments to reduce or inhibit SNCA gene expression are microRNA (miRNA), short hairpin RNA (shRNA) and short siRNA (see, e.g., Hamilton et al. (2002) EMBO J. 21:4671-79; see also, US Patent Application Publication No. 2009/0099115).

[0182] Still, in some embodiments, an oligonucleotide for reducing or inhibiting SNCA gene expression herein is ss. Such structures may include but are not limited to ss RNAi molecules. Recent efforts have demonstrated the activity of ss RNAi molecules (see, e.g., Matsui et al. (2016) Mol. Ther. 24:946-955). However, in some embodiments, the oligonucleotide is an antisense oligonucleotide (ASO). An antisense oligonucleotide is a ss oligonucleotide that has a nucleobase sequence and that, when written or depicted in the 5′ to 3′ direction, comprises the reverse complement of a targeted segment of a particular nucleic acid and is suitably modified (e.g., as a gapmer) so as to induce RNaseH-mediated cleavage of its target RNA in cells or (e.g., as a mixmer) so as to inhibit translation of the target mRNA in cells. ASOs for use herein may be modified in any suitable manner known in the art including, for example, as shown in U.S. Pat. No. 9,567,587 (including, e.g., length, sugar moieties of the nucleobase (pyrimidine, purine), and alterations of the heterocyclic portion of the nucleobase). Further, ASOs have been used for decades to reduce expression of specific target genes (see, e.g., Bennett et al. (2017) Annu. Rev. Pharmacol. 57:81-105).

[0183] In some embodiments, the antisense oligonucleotide (ASO) shares a region of complementarity with SNCA mRNA. In some embodiments, the ASO targets various areas of the human SNCA identified as NM 000345.3. In some embodiments, the ASO is about 15 to about 50 nucleotides in length. In some embodiments, the ASO is 15-25 nucleotides in length. In some embodiments, the ASO is 22 nucleotides in length. In some embodiments, the ASO is complementary to any one of SEQ ID NOs: 1683-2066. In some embodiments, the ASO is at least contiguous nucleotides in length. In some embodiments, the ASO is at least 19 contiguous nucleotides in length. In some embodiments, the ASO is at least 20 contiguous nucleotides in length. In some embodiments, the ASO differs by 1, 2, or 3 nucleotides from the target sequence.

### Double-Stranded RNAi Oligonucleotides

[0184] In some aspects, the disclosure provides ds RNAi oligonucleotides for targeting SNCA mRNA and inhibiting SNCA gene expression (e.g., via the RNAi pathway) comprising a sense strand (also referred to herein as a passenger strand) and an antisense strand (also referred to herein as a guide strand). In some embodiments, the sense strand and antisense strand are separate strands and are not covalently linked. In some embodiments, the sense strand and the antisense strand are covalently linked. In some embodiments, the sense strand and the antisense strand form a duplex region, wherein the sense strand and the antisense strand, or a portion thereof, binds with one another in a complementary fashion (e.g., by Watson-Crick base pairing).

[0185] In some embodiments, the sense strand has a first region (R1) and a second region (R2), wherein R2 comprises a first subregion (S1), a loop (L) such as a tetraloop (tetraL) or triloop (triL), and a second subregion (S2), wherein L is located between S1 and S2, and wherein S1 and S2 form a second duplex (D2). D2 may have various lengths. In some embodiments, D2 is about 1 to about 6 bp in length. In some embodiments, D2 is 2-6, 3-6, 4-6, 5-6, 1-5, 2-5, 3-5, or 4-5 bp in length. In some embodiments, D2 is 1, 2, 3, 4, 5, or 6 bp in length. In some embodiments, D2 is 6 bp in length.

[0186] In some embodiments, R1 of the sense strand and the antisense strand form a first duplex (D1). In some embodiments, D1 is at least about 15 (e.g., at least 15, at least 16, at least 17, at least 18, at least 19, at least 20, or at least 21) nucleotides in length. In some embodiments, D1 is in the range of about 12 to about 30 nucleotides in length (e.g., 12 to 30, 12 to 27, 15 to 22, 18 to 22, 18 to 25, 18 to 27, 18 to 30 or 21 to 30 nucleotides in length). In some embodiments, D1 is at least 12 nucleotides in length (e.g., at least 12, at least 15, at least 20, at least 25, or at least 30 nucleotides in length). In some embodiments, D1 is 12, 13, 14, 15, 16, 17, 18, 19, 20, 21, 22, 23, 24, 25, 26, 27, 28, 29, or 30 nucleotides in length. In some embodiments, D1 is 19 nucleotides in length. In some embodiments, D1 is 20 nucleotides in length. In some embodiments, D1 comprising the sense strand and the antisense strand does not span the entire length of the sense strand and/or the antisense strand. In some embodiments, D1 comprising the sense strand and the antisense strand spans the entire length of either the sense strand or the antisense strand or both. In certain embodiments, D1 comprising the sense strand and the antisense strand spans the entire length of both the sense strand and the antisense strand.

[0187] In some embodiments, the sense strand is 36 nucleotides in length and positions are numbered 1-36 from 5′ to 3′. In some embodiments, the antisense strand is 22 nucleotides in length and positions are numbered 1-22 from 5′ to 3′. In some embodiments, position numbers described herein adhere to this numbering format.

[0188] In some embodiments, the oligonucleotide comprises a sense strand having a sequence of any one of SEQ ID NOs: 1-384 and an antisense strand comprising a complementary sequence of any one of SEQ ID NOs: 385-768. In some embodiments, the oligonucleotide comprises a sense strand having a sequence of SEQ ID NOs: 1683-2066 and an antisense strand comprising a complementary sequence of any one of SEQ ID NOs: 2067-2450.

[0189] In some embodiments, the oligonucleotide comprises a sense strand having a sequence of any one of SEQ ID NOs: 1537-1571 and an antisense strand comprising a complementary sequence of any one of SEQ ID NOs: 1572-1606. In some embodiments, the oligonucleotide comprises a sense strand having a sequence of any one of SEQ ID NOs: 1537-1571 and 1681 and an antisense strand comprising a complementary sequence of any one of SEQ ID NOs: 1572-1606.

[0190] In some embodiments, the oligonucleotide comprises a sense strand and an antisense strand comprising nucleotide sequences selected from:
[0191] a) SEQ ID NOs: 1537 and 1572, respectively;
[0192] b) SEQ ID NOs: 1538 and 1573, respectively;
[0193] c) SEQ ID NOs: 1539 and 1574, respectively;
[0194] d) SEQ ID NOs: 1540 and 1575, respectively;
[0195] e) SEQ ID NOs: 1541 and 1576, respectively;
[0196] f) SEQ ID NOs: 1542 and 1577, respectively;
[0197] g) SEQ ID NOs: 1543 and 1578, respectively;
[0198] h) SEQ ID NOs: 1544 and 1579, respectively;
[0199] i) SEQ ID NOs: 1545 and 1580, respectively;
[0200] j) SEQ ID NOs: 1546 and 1581, respectively;
[0201] k) SEQ ID NOs: 1547 and 1582, respectively;
[0202] l) SEQ ID NOs: 1548 and 1583, respectively;
[0203] m) SEQ ID NOs: 1549 and 1584, respectively;
[0204] n) SEQ ID NOs: 1550 and 1585, respectively;
[0205] o) SEQ ID NOs: 1551 and 1586, respectively;
[0206] p) SEQ ID NOs: 1552 and 1587, respectively;
[0207] q) SEQ ID NOs: 1553 and 1588, respectively;
[0208] r) SEQ ID NOs: 1554 and 1589, respectively;
[0209] s) SEQ ID NOs: 1555 and 1590, respectively;
[0210] t) SEQ ID NOs: 1556 and 1591, respectively;
[0211] u) SEQ ID NOs: 1557 and 1592, respectively;
[0212] v) SEQ ID NOs: 1558 and 1593, respectively;
[0213] w) SEQ ID NOs: 1559 and 1594, respectively;
[0214] x) SEQ ID NOs: 1560 and 1595, respectively;
[0215] y) SEQ ID NOs: 1561 and 1596, respectively;
[0216] z) SEQ ID NOs: 1562 and 1597, respectively;
[0217] aa) SEQ ID NOs: 1563 and 1598, respectively;
[0218] bb) SEQ ID NOs: 1564 and 1599, respectively;
[0219] cc) SEQ ID NOs: 1565 and 1600, respectively;
[0220] dd) SEQ ID NOs: 1566 and 1601, respectively;
[0221] ee) SEQ ID NOs: 1567 and 1602, respectively;
[0222] ff) SEQ ID NOs: 1568 and 1603, respectively;
[0223] gg) SEQ ID NOs: 1569 and 1604, respectively;
[0224] hh) SEQ ID NOs: 1570 and 1605, respectively;
[0225] ii) SEQ ID NOs: 1571 and 1606, respectively; and
[0226] jj) SEQ ID NOs: 1681 and 1586, respectively.

[0227] In some embodiments, the oligonucleotide comprises a sense strand and an antisense strand comprising nucleotide sequences selected from:
[0228] a) SEQ ID NOs: 1540 and 1575, respectively;
[0229] b) SEQ ID NOs: 1544 and 1579, respectively;
[0230] c) SEQ ID NOs: 1546 and 1581, respectively;
[0231] d) SEQ ID NOs: 1551 and 1586, respectively;
[0232] e) SEQ ID NOs: 1552 and 1587, respectively;
[0233] f) SEQ ID NOs: 1553 and 1588, respectively;
[0234] g) SEQ ID NOs: 1558 and 1594, respectively;
[0235] h) SEQ ID NOs: 1560 and 1595, respectively;
[0236] i) SEQ ID NOs: 1564 and 1599, respectively;
[0237] j) SEQ ID NOs: 1565 and 1600, respectively;
[0238] k) SEQ ID NOs: 1566 and 1601, respectively;
[0239] l) SEQ ID NOs: 1570 and 1605, respectively; and
[0240] m) SEQ ID NOs: 1681 and 1586, respectively.

[0241] In some embodiments, the oligonucleotide comprises a sense strand and an antisense strand comprising nucleotide sequences selected from:
[0242] a) SEQ ID NOs: 1553 and 1588, respectively;
[0243] b) SEQ ID NOs: 1560 and 1595, respectively;
[0244] c) SEQ ID NOs: 1564 and 1599, respectively;
[0245] d) SEQ ID NOs: 1551 and 1586, respectively;
[0246] e) SEQ ID NOs: 1570 and 1605, respectively; and
[0247] f) SEQ ID NOs: 1681 and 1586, respectively.

[0248] In some embodiments, the sense strand comprises the sequence of SEQ ID NO: 1553 and the antisense strand comprises the sequence of SEQ ID NO: 1588. In some embodiments, the sense strand comprises the sequence of SEQ ID NO: 1560 and the antisense strand comprises the sequence of SEQ ID NO: 1595. In some embodiments, the sense strand comprises the sequence of SEQ ID NO: 1564 and the antisense strand comprises the sequence of SEQ ID NO: 1599. In some embodiments, the sense strand comprises the sequence of SEQ ID NO: 1551 and the antisense strand comprises the sequence of SEQ ID NO: 1586. In some embodiments, the sense strand comprises the sequence of SEQ ID NO: 1570 and the antisense strand comprises the sequence of SEQ ID NO: 1605. In some embodiments, the sense strand comprises the sequence of SEQ ID NO: 1681 and the antisense strand comprises the sequence of SEQ ID NO: 1586.

[0249] It should be appreciated that, in some embodiments, sequences presented in the Sequence Listing may be referred to in describing the structure of the oligonucleotide (e.g., a RNAi oligonucleotide) or other nucleic acid. In such embodiments, the actual oligonucleotide or other nucleic acid may have one or more alternative nucleotides (e.g., a RNA counterpart of a DNA nucleotide or a DNA counterpart of a RNA nucleotide) and/or one or more modified nucleotides and/or one or more modified internucleotide linkages and/or one or more other modification when compared with the specified sequence while retaining essentially same or similar complementary properties as the specified sequence.

[0250] In some embodiments, a RNAi oligonucleotide herein comprises a 25-nucleotide sense strand and a 27-nucleotide antisense strand that when acted upon by a Dicer enzyme results in an antisense strand that is incorporated into the mature RNA-induced silencing complex (RISC). In some embodiments, the 25-nucleotide sense strand comprises a sequence selected from SEQ ID NOs: 1-384. In some embodiments, the 27-nucleotide antisense strand comprises a sequence selected from SEQ ID NOs: 385-768. In some embodiments, the sense strand is longer than 27 nucleotides (e.g., 28, 29, 30, 31, 32, 33, 34, 35, 36, 37, 38, 39, 40, 41, 42, 43, 44, 45, 46, 47, 48, 49, or 50 nucleotides). In some embodiments, the sense strand is longer than 25 nucleotides (e.g., 26, 27, 28, 29, or 30 nucleotides). In some embodiments, the sense strand comprises a nucleotide sequence selected from SEQ ID NOs: 1683-2066, wherein the nucleotide sequence is longer than 27 nucleotides (e.g., 28, 29, 30, 31, 32, 33, 34, 35, 36, 37, 38, 39, 40, 41, 42, 43, 44, 45, 46, 47, 48, 49, or 50 nucleotides). In some embodiments, the sense strand comprises a nucleotide sequence selected from SEQ ID NOs: 1683-2066, wherein the nucleotide sequence is longer than 25 nucleotides (e.g., 26, 27, 28, 29, or 30 nucleotides).

[0251] In some embodiments, the oligonucleotide has one 5′ end that is thermodynamically less stable when compared to the other 5′ end. In some embodiments, an asymmetric RNAi oligonucleotide is provided that comprises a blunt end at the 3′ end of a sense strand and a 3′ overhang at the 3′ end of an antisense strand. In some embodiments, the 3′ overhang on the antisense strand is about 1 to about 8 nucleotides in length (e.g., 1, 2, 3, 4, 5, 6, 7, or 8 nucleotides in length). Typically, the oligonucleotide has a two-nucleotide overhang on the 3′ end of the antisense strand. However, other overhangs are possible. In some embodiments, the overhang is a 3′ overhang comprising a length of between 1 and 6 nucleotides, optionally 1 to 5, 1 to 4, 1 to 3, 1 to 2, 2 to 6, 2 to 5, 2 to 4, 2 to 3, 3 to 6, 3 to 5, 3 to 4, 4 to 6, 4 to 5, 5 to 6 nucleotides, or 1, 2, 3, 4, 5, or 6 nucleotides. In other embodiments, the overhang is a 5′ overhang comprising a length of between 1 and 6 nucleotides, optionally 1 to 5, 1 to 4, 1 to 3, 1 to 2, 2 to 6, 2 to 5, 2 to 4, 2 to 3, 3 to 6, 3 to 5, 3 to 4, 4 to 6, 4 to 5, 5 to 6 nucleotides, or 1, 2, 3, 4, 5, or 6 nucleotides.

[0252] In some embodiments, two terminal nucleotides on the 3′ end of the antisense strand are modified. In some embodiments, the two terminal nucleotides on the 3′ end of the antisense strand are complementary with the target mRNA (e.g., SNCA mRNA). In some embodiments, the two terminal nucleotides on the 3′ end of the antisense strand are not complementary with the target mRNA. In some embodiments, the two terminal nucleotides on the 3′ end of the antisense strand of the oligonucleotide are unpaired. In some embodiments, the two terminal nucleotides on the 3′ end of the antisense strand of the oligonucleotide comprise an unpaired GG. In some embodiments, the two terminal nucleotides on the 3′ end of the antisense strand of the oligonucleotide are not complementary to the target mRNA. In some embodiments, two terminal nucleotides on each 3′ end of the oligonucleotide are GG. Typically, one or both of the two terminal GG nucleotides on each 3′ end of a ds oligonucleotide are not complementary with the target mRNA. In some embodiments, two terminal nucleotides on each 3′ end of the oligonucleotide are GG. In some embodiments, one or both of the two terminal GG nucleotides on each 3′ end of the oligonucleotide are not complementary with the target mRNA. In some embodiments, the oligonucleotide comprises a targeting sequence or a region of complementary that is complementary to a contiguous sequence of nucleotides of any one of SEQ ID NOs: 2067-2045, wherein the two terminal nucleotides on the 3′ end of the antisense strand of the oligonucleotide comprise an unpaired GG. In some embodiments, the oligonucleotide comprises an antisense strand comprising a nucleotide sequence selected from SEQ ID NOs: 2067-2450, wherein the two terminal nucleotides on the 3′ end of the antisense strand of the oligonucleotide comprise an unpaired GG. In some embodiments, the oligonucleotide comprises a sense strand comprising a nucleotide sequence selected from SEQ ID NOs: 1683-2066 and antisense strand comprising a nucleotide sequence selected from SEQ ID NOs: 2067-2450, wherein the two terminal nucleotides on the 3′ end of the antisense strand of the oligonucleotide comprise an unpaired GG.

[0253] In some embodiments, there is one or more (e.g., 1, 2, 3, 4, or 5) mismatch(es) between the sense and antisense strands comprising an oligonucleotide herein. If there is more than one mismatch between the sense and antisense strands, they may be positioned consecutively (e.g., 2, 3, or more in a row) or may be interspersed throughout the region of complementarity. In some embodiments, the 3′ end of the sense strand contains one or more mismatches. In one embodiment, two mismatches are incorporated at the 3′ end of the sense strand. In some embodiments, base mismatches or destabilization of segments at the 3′ end of the sense strand of the oligonucleotide improves or increases the potency of the oligonucleotide.

[0254] In some embodiments, the oligonucleotide comprises a sense strand and an antisense strand comprising nucleotide sequences selected from:
[0255] a) SEQ ID NOs: 1537 and 1572, respectively;
[0256] b) SEQ ID NOs: 1538 and 1573, respectively;
[0257] c) SEQ ID NOs: 1539 and 1574, respectively;
[0258] d) SEQ ID NOs: 1540 and 1575, respectively;
[0259] e) SEQ ID NOs: 1541 and 1576, respectively;
[0260] f) SEQ ID NOs: 1542 and 1577, respectively;
[0261] g) SEQ ID NOs: 1543 and 1578, respectively;
[0262] h) SEQ ID NOs: 1544 and 1579, respectively;
[0263] i) SEQ ID NOs: 1545 and 1580, respectively;
[0264] j) SEQ ID NOs: 1546 and 1581, respectively;
[0265] k) SEQ ID NOs: 1547 and 1582, respectively;
[0266] l) SEQ ID NOs: 1548 and 1583, respectively;
[0267] m) SEQ ID NOs: 1549 and 1584, respectively;
[0268] n) SEQ ID NOs: 1550 and 1585, respectively;
[0269] o) SEQ ID NOs: 1551 and 1586, respectively;
[0270] p) SEQ ID NOs: 1552 and 1587, respectively;
[0271] q) SEQ ID NOs: 1553 and 1588, respectively;
[0272] r) SEQ ID NOs: 1554 and 1589, respectively;
[0273] s) SEQ ID NOs: 1555 and 1590, respectively;
[0274] t) SEQ ID NOs: 1556 and 1591, respectively;
[0275] u) SEQ ID NOs: 1557 and 1592, respectively;
[0276] v) SEQ ID NOs: 1558 and 1593, respectively;
[0277] w) SEQ ID NOs: 1559 and 1594, respectively;
[0278] x) SEQ ID NOs: 1560 and 1595, respectively;
[0279] y) SEQ ID NOs: 1561 and 1596, respectively;
[0280] z) SEQ ID NOs: 1562 and 1597, respectively;
[0281] aa) SEQ ID NOs: 1563 and 1598, respectively;
[0282] bb) SEQ ID NOs: 1564 and 1599, respectively;
[0283] cc) SEQ ID NOs: 1565 and 1600, respectively;
[0284] dd) SEQ ID NOs: 1566 and 1601, respectively;
[0285] ee) SEQ ID NOs: 1567 and 1602, respectively;
[0286] ff) SEQ ID NOs: 1568 and 1603, respectively;
[0287] gg) SEQ ID NOs: 1569 and 1604, respectively;
[0288] hh) SEQ ID NOs: 1570 and 1605, respectively;
[0289] ii) SEQ ID NOs: 1571 and 1606, respectively; and
[0290] jj) SEQ ID NOs: 1681 and 1586, respectively,
   wherein there is one or more (e.g., 1, 2, 3, 4, or 5) mismatch(s) between the sense and antisense strands.

[0291] In some embodiments, the oligonucleotide comprises a sense strand and an antisense strand comprising nucleotide sequences selected from:
[0292] a) SEQ ID NOs: 1540 and 1575, respectively;
[0293] b) SEQ ID NOs: 1544 and 1579, respectively;
[0294] c) SEQ ID NOs: 1546 and 1581, respectively;
[0295] d) SEQ ID NOs: 1551 and 1586, respectively;
[0296] e) SEQ ID NOs: 1552 and 1587, respectively;
[0297] f) SEQ ID NOs: 1553 and 1588, respectively;
[0298] g) SEQ ID NOs: 1558 and 1594, respectively;
[0299] h) SEQ ID NOs: 1560 and 1595, respectively;
[0300] i) SEQ ID NOs: 1564 and 1599, respectively;
[0301] j) SEQ ID NOs: 1565 and 1600, respectively;
[0302] k) SEQ ID NOs: 1566 and 1601, respectively;
[0303] l) SEQ ID NOs: 1570 and 1605, respectively; and
[0304] m) SEQ ID NOs: 1681 and 1586, respectively,
   wherein there is one or more (e.g., 1, 2, 3, 4, or 5) mismatch(s) between the sense and antisense strands.

[0305] In some embodiments, the oligonucleotide comprises a sense strand and an antisense strand comprising sequence selected from:
[0306] a) SEQ ID NOs: 1553 and 1588, respectively;
[0307] b) SEQ ID NOs: 1560 and 1595, respectively;
[0308] c) SEQ ID NOs: 1564 and 1599, respectively;
[0309] d) SEQ ID NOs: 1551 and 1586, respectively;
[0310] e) SEQ ID NOs: 1570 and 1605, respectively; and,
[0311] f) SEQ ID NOs: 1681 and 1586, respectively,
   wherein there is one or more (e.g., 1, 2, 3, 4 or 5) mismatch(s) between the sense and antisense strands.

### Antisense Strands

[0312] In some embodiments, an antisense strand of an oligonucleotide is referred to as a “guide strand,” which engages with RISC and binds to an Argonaute protein such as Ago2, or engages with or binds to one or more similar factors, and directs silencing of a target gene. In some embodiments, a sense strand complementary to the antisense strand is referred to as a “passenger strand.”

[0313] In some embodiments, the oligonucleotide comprises an antisense strand of up to about nucleotides in length (e.g., up to 50, up to 40, up to 35, up to 30, up to 27, up to 25, up to 21, up to 19, up to 17, up to 15, or up to 12 nucleotides in length). In some embodiments, the oligonucleotide comprises an antisense strand of at least about 12 nucleotides in length (e.g., at least 12, at least 15, at least 19, at least 21, at least 22, at least 25, at least 27, at least 30, at least or at least 38 nucleotides in length). In some embodiments, the antisense strand is in a range of about 12 to about 40 (e.g., 12 to 40, 12 to 36, 12 to 32, 12 to 28, 15 to 40, 15 to 36, 15 to 32, 15 to 30, 15 to 28, 17 to 22, 17 to 25, 19 to 27, 19 to 30, 20 to 40, 22 to 40, 25 to 40, or 32 to 40) nucleotides in length. In some embodiments, the oligonucleotide comprises an antisense of 15 to nucleotides in length. In some embodiments, the antisense strand of any one of the oligonucleotides disclosed herein is of 12, 13, 14, 15, 16, 17, 18, 19, 20, 21, 22, 23, 24, 25, 26, 27, 28, 29, 30, 31, 32, 33, 34, 35, 36, 37, 38, 39, or 40 nucleotides in length. In some embodiments, the antisense strand is 22 nucleotides in length.

[0314] In some embodiments, the antisense strand comprises or consists of a sequence as set forth in any one of SEQ ID NOs: 1683-2066. In some embodiments, the antisense strand comprises at least about 12 (e.g., at least 12, at least 13, at least 14, at least 15, at least 16, at least 17, at least 18, at least 19, at least 20, at least 21, at least 22, or at least 23) contiguous nucleotides of a sequence as set forth in any one of SEQ ID NOs: 2067-2450. In some embodiments, the antisense strand comprises or consists of a sequence as set forth in any one of SEQ ID NOs: 385-768. In some embodiments, the antisense strand comprises at least about 12 (e.g., at least 12, at least 13, at least 14, at least 15, at least 16, at least 17, at least 18, at least 19, at least 20, at least 21, at least 22, or at least 23) contiguous nucleotides of a sequence as set forth in any one of SEQ ID NOs: 385-768. In some embodiments, the antisense strand comprises or consists of a sequence as set forth in any one of SEQ ID NOs: 1572-1606. In some embodiments, the antisense strand comprises at least about 12 (e.g., at least 12, at least 13, at least 14, at least 15, at least 16, at least 17, at least 18, at least 19, at least 20, at least 21, at least 22, or at least 23) contiguous nucleotides of a sequence as set forth in any one of SEQ ID NOs: 1572-1606. In some embodiments, the antisense strand comprises or consists of a sequence as set forth in any one of SEQ ID NOs: 2067-2450. In some embodiments, the antisense strand comprises at least about 12 (e.g., at least 12, at least 13, at least 14, at least 15, at least 16, at least 17, at least 18, at least 19, at least 20, at least 21, at least 22, or at least 23) contiguous nucleotides of a sequence as set forth in any one of SEQ ID NOs: 2067-2450. In some embodiments, the antisense strand comprises or consists of a sequence as set forth in any one of SEQ ID NOs: 1575, 1579, 1581, 1586, 1587, 1588, 1594, 1595, 1599, 1600, 1601, 1605, and 1586. In some embodiments, the antisense strand comprises at least about 12 (e.g., at least 12, at least 13, at least 14, at least 15, at least 16, at least 17, at least 18, at least 19, at least at least 21, at least 22, or at least 23) contiguous nucleotides of a sequence as set forth in any one of SEQ ID NOs: 1575, 1579, 1581, 1586, 1587, 1588, 1594, 1595, 1599, 1600, 1601, 1605, and 1586. In some embodiments, the antisense strand comprises or consists of a sequence as set forth in any one of SEQ ID NOs: 1588, 1595, 1599, 1586, and 1605. In some embodiments, the antisense strand comprises at least about 12 (e.g., at least 12, at least 13, at least 14, at least 15, at least 16, at least 17, at least 18, at least 19, at least 20, at least 21, at least 22, or at least 23) contiguous nucleotides of a sequence as set forth in any one of SEQ ID NOs: 1588, 1595, 1599, 1586, and 1605.

### Sense Strands

[0315] In some embodiments, the oligonucleotide comprises a sense strand sequence as set forth in in any one of SEQ ID NOs: 1683-2066. In some embodiments, the sense strand comprises at least about 12 (e.g., at least 13, at least 14, at least 15, at least 16, at least 17, at least 18, at least 19, at least 20, at least 21, at least 22, or at least 23) contiguous nucleotides of a sequence as set forth in in any one of SEQ ID NOs: 1683-2066. In some embodiments, the sense strand comprises a sequence a set forth in any one of SEQ ID NOs: 1-384. In some embodiments, the sense strand comprises at least about 12 (e.g., at least 13, at least 14, at least 15, at least 16, at least 17, at least 18, at least 19, at least 20, at least 21, at least 22, or at least 23) contiguous nucleotides of a sequence as set forth in in any one of SEQ ID NOs: 1-384. In some embodiments, the sense strand comprises a sequence as set forth in any one of SEQ ID NOs: 1537-1571. In some embodiments, the sense strand comprises a sequence as set forth in any one of SEQ ID NOs: 1537-1571 and 1681. In some embodiments, the sense strand is SEQ ID NO: 1681. In some embodiments, the sense strand comprises at least about 12 (e.g., at least 13, at least 14, at least 15, at least 16, at least 17, at least 18, at least 19, at least 20, at least 21, at least 22, or at least 23) contiguous nucleotides of a sequence as set forth in any one of SEQ ID NOs: 1537-1571. In some embodiments, the sense strand comprises a sequence as set forth in any one of SEQ ID NOs: 1781, 1782, 1796, 1798, 1802, 1808, 1814, 1817, 1713, 1718, 1726, 1830, 1839, 1742, 1846, 1852, 1865, 1784, 1804, 1721, 1822, 1840, 1735, 1847, 1855, 1864, 1901, 1902, 1938, 1947, 1955, 1964, 1973, and 1978. In some embodiments, the sense strand comprises at least about 12 (e.g., at least 13, at least 14, at least 15, at least 16, at least 17, at least 18, at least 19, at least 20, at least 21, at least 22, or at least 23) contiguous nucleotides of a sequence as set forth in any one of SEQ ID NOs: 1781, 1782, 1796, 1798, 1802, 1808, 1814, 1817, 1713, 1718, 1726, 1830, 1839, 1742, 1846, 1852, 1865, 1784, 1804, 1721, 1822, 1840, 1735, 1847, 1855, 1864, 1901, 1902, 1938, 1947, 1955, 1964, 1973, and 1978. In some embodiments, the sense strand comprises a sequence as set forth in any one of SEQ ID NOs: 1540, 1544, 1546, 1551, 1552, 1553, 1558, 1560, 1564, 1565, 1566, and 1570. In some embodiments, the sense strand comprises at least about 12 (e.g., at least 13, at least 14, at least 15, at least 16, at least 17, at least 18, at least 19, at least 20, at least 21, at least 22 or at least 23) contiguous nucleotides of a sequence as set forth in any one of SEQ ID NOs: 1540, 1544, 1546, 1551, 1552, 1553, 1558, 1560, 1564, 1565, 1566, and 1570. In some embodiments, the sense strand comprises a sequence as set forth in any one of SEQ ID NOs: 1553, 1560, 1564, 1551, and 1570. In some embodiments, the sense strand that comprises at least about 12 (e.g., at least 13, at least 14, at least 15, at least 16, at least 17, at least 18, at least 19, at least 20, at least 21, at least 22, or at least 23) contiguous nucleotides of a sequence as set forth in any one of SEQ ID NOs: 1553, 1560, 1564, 1551, and 1570.

[0316] In some embodiments, the oligonucleotide comprises a sense strand sequence as set forth in any one of SEQ ID NOs: 1540, 1544, 1546, 1551, 1552, 1553, 1558, 1560, 1564, 1565, 1566, 1570, and 1681. In some embodiments, the sense strand comprises at least about 12 (e.g., at least 13, at least 14, at least 15, at least 16, at least 17, at least 18, at least 19, at least 20, at least 21, at least 22, or at least 23) contiguous nucleotides of a sequence as set forth in any one of SEQ ID NOs: 1540, 1544, 1546, 1551, 1552, 1553, 1558, 1560, 1564, 1565, 1566, 1570, and 1681. In some embodiments, the sense strand comprises a sequence as set forth in any one of SEQ ID NOs: 1553, 1560, 1564, 1551, 1570, and 1681. In some embodiments, the sense strand comprises at least about 12 (e.g., at least 13, at least 14, at least 15, at least 16, at least 17, at least 18, at least 19, at least at least 21, at least 22, or at least 23) contiguous nucleotides of a sequence as set forth in any one of SEQ ID NOs: 1553, 1560, 1564, 1551, 1570, and 1681.

[0317] In some embodiments, the sense strand comprises up to about 50 nucleotides in length (e.g., up to 50, up to 40, up to 36, up to 30, up to 27, up to 25, up to 21, up to 19, up to 17, or up to 12 nucleotides in length). In some embodiments, the sense strand comprises at least about 12 nucleotides in length (e.g., at least 12, at least 15, at least 19, at least 21, at least 25, at least 27, at least 30, at least 36, or at least 38 nucleotides in length). In some embodiments, the sense strand is in a range of about 12 to about 50 (e.g., 12 to 50, 12 to 40, 12 to 36, 12 to 32, 12 to 28, 15 to 40, to 36, 15 to 32, 15 to 28, 17 to 21, 17 to 25, 19 to 27, 19 to 30, 20 to 40, 22 to 40, 25 to 40, or 32 to 40) nucleotides in length. In some embodiments, the sense strand comprises 15 to 50 nucleotides in length. In some embodiments, the sense strand comprises 18 to 36 nucleotides in length. In some embodiments, the sense strand comprises 12, 13, 14, 15, 16, 17, 18, 19, 20, 21, 22, 23, 24, 25, 26, 27, 28, 29, 30, 31, 32, 33, 34, 35, 36, 37, 38, 39, 40, 41, 42, 43, 44, 45, 46, 47, 48, 49, or 50 nucleotides in length. In some embodiments, the sense strand is 36 nucleotides in length.

[0318] In some embodiments, the sense strand comprises a stem-loop structure at its 3′ end. In some embodiments, the stem-loop is formed by intrastrand base pairing. In some embodiments, the sense strand comprises a stem-loop structure at its 5′ end. In some embodiments, the stem of the stem-loop comprises a duplex of 2, 3, 4, 5, 6, 7, 8, 9, 10, 11, 12, 13, or 14 nucleotides in length. In some embodiments, the stem of the stem-loop comprises a duplex of 2 nucleotides in length. In some embodiments, the stem of the stem-loop comprises a duplex of 3 nucleotides in length. In some embodiments, the stem of the stem-loop comprises a duplex of 4 nucleotides in length. In some embodiments, the stem of the stem-loop comprises a duplex of 5 nucleotides in length. In some embodiments, the stem of the stem-loop comprises a duplex of 6 nucleotides in length. In some embodiments, the stem of the stem-loop comprises a duplex of 7 nucleotides in length. In some embodiments, the stem of the stem-loop comprises a duplex of 8 nucleotides in length. In some embodiments, the stem of the stem-loop comprises a duplex of 9 nucleotides in length. In some embodiments, the stem of the stem-loop comprises a duplex of 10 nucleotides in length. In some embodiments, the stem of the stem-loop comprises a duplex of 11 nucleotides in length. In some embodiments, the stem of the stem-loop comprises a duplex of 12 nucleotides in length. In some embodiments, the stem of the stem-loop comprises a duplex of 13 nucleotides in length. In some embodiments, the stem of the stem-loop comprises a duplex of 14 nucleotides in length.

[0319] In some embodiments, a stem-loop provides the oligonucleotide protection against degradation (e.g., enzymatic degradation), facilitates or improves targeting and/or delivery to a target cell, tissue, or organ (e.g., the liver or brain), or both. For example, in some embodiments, the loop of the stem-loop provides nucleotides comprising one or more modifications that facilitate, improve, or increase targeting to a target mRNA (e.g., a SNCA mRNA), inhibition of target gene expression (e.g., SNCA gene expression), and/or delivery to a target cell, tissue, or organ (e.g., the CNS), or a combination thereof. In some embodiments, the stem-loop itself or modification(s) to the stem-loop do not substantially affect the inherent gene expression inhibition activity of the oligonucleotide, but facilitates, improves, or increases stability (e.g., provides protection against degradation) and/or delivery of the oligonucleotide to a target cell, tissue, or organ (e.g., the CNS). In certain embodiments, the oligonucleotide comprises a sense strand comprising (e.g., at its 3′ end) a stem-loop set forth as: S1-L-S2, in which S1 is complementary to S2, and in which L forms a single-stranded loop between S1 and S2 of up to about 10 nucleotides in length (e.g., 3, 4, 5, 6, 7, 8, 9, or 10 nucleotides in length). In some embodiments, the loop (L) is 3 nucleotides in length (e.g., triloop or triL). In some embodiments, the loop (L) is 4 nucleotides in length (e.g., tetraloop or tetraL). In some embodiments, the loop (L) is 5 nucleotides in length (e.g., pentaloop or pentaL). In some embodiments, the loop (L) is 6 nucleotides in length (e.g., hexaloop or hexaL). In some embodiments, the loop (L) is 7 nucleotides in length (e.g., heptaloop or heptaL). In some embodiments, the loop (L) is 8 nucleotides in length (e.g., octaloop or octaL). In some embodiments, the loop (L) is 9 nucleotides in length (e.g., nonaloop or nonaL). In some embodiments, the loop (L) is 10 nucleotides in length (e.g., decaloop or decaL).

[0320] In some embodiments, the oligonucleotide comprises a targeting sequence or a region of complementary that is complementary to a contiguous sequence of nucleotides of any one of SEQ ID NOs: 1683-2066, and the oligonucleotide comprises a sense strand comprising (e.g., at its 3′ end) a stem-loop set forth as: S1-L-S2, in which S1 is complementary to S2, and in which L forms a ss loop between S1 and S2 of up to about 10 nucleotides in length (e.g., 3, 4, 5, 6, 7, 8, 9, or 10 nucleotides in length). In some embodiments, the oligonucleotide comprises a targeting sequence or a region of complementary that is complementary to a contiguous sequence of nucleotides of any one of SEQ ID NOs: 1683-2066, and the oligonucleotide comprises a sense strand comprising (e.g., at its 3′ end) a stem-loop set forth as: S1-L-S2, in which S1 is complementary to S2, and in which L forms a ss loop between S1 and S2 of 4 nucleotides in length. In some embodiments, a loop (L) of a stem-loop having the structure S1-L-S2 as described above is a tetraL as described in U.S. Pat. No. 10,131,912, incorporated herein by reference (e.g., within a nicked tetraloop structure). In some embodiments, the oligonucleotide comprises a targeting sequence or a region of complementary that is complementary to a contiguous sequence of nucleotides of any one of SEQ ID NOs: 1683-2066 and a tetraL. In some embodiments, the tetraloop comprises the sequence -GAAA-3′. In some embodiments, the stem loop comprises the sequence 5′-GCAGCCGAAAGGCUGC-3′ (SEQ ID NO: 1680).

[0321] In other embodiments, the loop (L) is a triL. In some embodiments, the oligonucleotide comprises a targeting sequence or a region of complementary that is complementary to a contiguous sequence of nucleotides of any one of SEQ ID NOs: 1683-2066 and a triL. In some embodiments, the triL comprises ribonucleotides, deoxyribonucleotides, modified nucleotides, delivery ligands, and combinations thereof.

### Duplex Length

[0322] In some embodiments, a duplex formed between the sense and antisense strands is at least about 12 (e.g., at least 15, at least 16, at least 17, at least 18, at least 19, at least 20, or at least 21) nucleotides in length. In some embodiments, the duplex is in the range of about 12 to about 30 nucleotides in length (e.g., 12 to 30, 12 to 27, 12 to 22, 15 to 25, 18 to 30, 18 to 22, 18 to 25, 18 to 27, 18 to 30, 19 to 30, or 21 to 30 nucleotides in length). In some embodiments, the duplex is 12, 13, 14, 15, 16, 17, 18, 19, 29, 21, 22, 23, 24, 25, 26, 27, 28, 29, or 30 nucleotides in length. In some embodiments, the duplex is 12 nucleotides in length. In some embodiments, the duplex is 13 nucleotides in length. In some embodiments, the duplex is 14 nucleotides in length. In some embodiments, the duplex is 15 nucleotides in length. In some embodiments, the duplex is 16 nucleotides in length. In some embodiments, the duplex is 17 nucleotides in length. In some embodiments, the duplex is 18 nucleotides in length. In some embodiments, the duplex is 19 nucleotides in length. In some embodiments, the duplex is 20 nucleotides in length. In some embodiments, the duplex is 21 nucleotides in length. In some embodiments, the duplex is 22 nucleotides in length. In some embodiments, the duplex is 23 nucleotides in length. In some embodiments, the duplex formed is 24 nucleotides in length. In some embodiments, the duplex is 25 nucleotides in length. In some embodiments, the duplex is 26 nucleotides in length. In some embodiments, the duplex is 27 nucleotides in length. In some embodiments, the duplex is 28 nucleotides in length. In some embodiments, the duplex is 29 nucleotides in length. In some embodiments, the duplex is 30 nucleotides in length. In some embodiments, the duplex does not span the entire length of the sense strand and/or the antisense strand. In some embodiments, the duplex spans the entire length of either the sense or antisense strands. In some embodiments, the duplex spans the entire length of both the sense strand and the antisense strand.

[0323] In some embodiments, the sense and antisense strands comprise nucleotide sequences selected from the group consisting of:
[0324] a) SEQ ID NOs: 1537 and 1572, respectively;
[0325] b) SEQ ID NOs: 1538 and 1573, respectively;
[0326] c) SEQ ID NOs: 1539 and 1574, respectively;
[0327] d) SEQ ID NOs: 1540 and 1575, respectively;
[0328] e) SEQ ID NOs: 1541 and 1576, respectively;
[0329] f) SEQ ID NOs: 1542 and 1577, respectively;
[0330] g) SEQ ID NOs: 1543 and 1578, respectively;
[0331] h) SEQ ID NOs: 1544 and 1579, respectively;
[0332] i) SEQ ID NOs: 1545 and 1580, respectively;
[0333] j) SEQ ID NOs: 1546 and 1581, respectively;
[0334] k) SEQ ID NOs: 1547 and 1582, respectively;
[0335] l) SEQ ID NOs: 1548 and 1583, respectively;
[0336] m) SEQ ID NOs: 1549 and 1584, respectively;
[0337] n) SEQ ID NOs: 1550 and 1585, respectively;
[0338] o) SEQ ID NOs: 1551 and 1586, respectively;
[0339] p) SEQ ID NOs: 1552 and 1587, respectively;
[0340] q) SEQ ID NOs: 1553 and 1588, respectively;
[0341] r) SEQ ID NOs: 1554 and 1589, respectively;
[0342] s) SEQ ID NOs: 1555 and 1590, respectively;
[0343] t) SEQ ID NOs: 1556 and 1591, respectively;
[0344] u) SEQ ID NOs: 1557 and 1592, respectively;
[0345] v) SEQ ID NOs: 1558 and 1593, respectively;
[0346] w) SEQ ID NOs: 1559 and 1594, respectively;
[0347] x) SEQ ID NOs: 1560 and 1595, respectively;
[0348] y) SEQ ID NOs: 1561 and 1596, respectively;
[0349] z) SEQ ID NOs: 1562 and 1597, respectively;
[0350] aa) SEQ ID NOs: 1563 and 1598, respectively;
[0351] bb) SEQ ID NOs: 1564 and 1599, respectively;
[0352] cc) SEQ ID NOs: 1565 and 1600, respectively;
[0353] dd) SEQ ID NOs: 1566 and 1601, respectively;
[0354] ee) SEQ ID NOs: 1567 and 1602, respectively;
[0355] ff) SEQ ID NOs: 1568 and 1603, respectively;
[0356] gg) SEQ ID NOs: 1569 and 1604, respectively;
[0357] hh) SEQ ID NOs: 1570 and 1605, respectively;
[0358] ii) SEQ ID NOs: 1571 and 1606, respectively; and
[0359] jj) SEQ ID NOs: 1681 and 1586, respectively,
   wherein a duplex formed between the sense and antisense strands is in the range of about 12 to about 30 nucleotides in length (e.g., 12 to 30, 12 to 27, 12 to 22, 15 to 25, 18 to 30, 18 to 22, 18 to 25, 18 to 27, 18 to 30, 19 to 30, or 21 to 30 nucleotides in length).

[0360] In some embodiments, the sense and antisense strands comprise nucleotide sequences selected from the group consisting of:
[0361] a) SEQ ID NOs: 1540 and 1575, respectively;
[0362] b) SEQ ID NOs: 1544 and 1579, respectively;
[0363] c) SEQ ID NOs: 1546 and 1581, respectively;
[0364] d) SEQ ID NOs: 1551 and 1586, respectively;
[0365] e) SEQ ID NOs: 1552 and 1587, respectively;
[0366] f) SEQ ID NOs: 1553 and 1588, respectively;
[0367] g) SEQ ID NOs: 1558 and 1594, respectively;
[0368] h) SEQ ID NOs: 1560 and 1595, respectively;
[0369] i) SEQ ID NOs: 1564 and 1599, respectively;
[0370] j) SEQ ID NOs: 1565 and 1600, respectively;
[0371] k) SEQ ID NOs: 1566 and 1601, respectively;
[0372] l) SEQ ID NOs: 1570 and 1605, respectively; and
[0373] m) SEQ ID NOs: 1681 and 1586, respectively,
   wherein a duplex formed between the sense and antisense strands is in the range of about 12 to about 30 nucleotides in length (e.g., 12 to 30, 12 to 27, 12 to 22, 15 to 25, 18 to 30, 18 to 22, 18 to 18 to 27, 18 to 30, 19 to 30, or 21 to 30 nucleotides in length).

[0374] In some embodiments, the sense and antisense strands comprise nucleotide sequences selected from the group consisting of:
[0375] a) SEQ ID NOs: 1553 and 1588, respectively;
[0376] b) SEQ ID NOs: 1560 and 1595, respectively;
[0377] c) SEQ ID NOs: 1564 and 1599, respectively;
[0378] d) SEQ ID NOs: 1551 and 1586, respectively;
[0379] e) SEQ ID NOs: 1570 and 1605, respectively; and,
[0380] f) SEQ ID NOs: 1681 and 1586, respectively,
   wherein a duplex formed between the sense and antisense strands is in the range of about 12 to about 30 nucleotides in length (e.g., 12 to 30, 12 to 27, 12 to 22, 15 to 25, 18 to 30, 18 to 22, 18 to 18 to 27, 18 to 30, 19 to 30, or 21 to 30 nucleotides in length).

### Oligonucleotide Termini

[0381] In some embodiments, the oligonucleotide (e.g., a RNAi oligonucleotide) comprises a sense strand and an antisense strand, wherein the termini of either or both strands comprise a blunt end. In some embodiments, the oligonucleotide comprises sense and antisense strands that are separate strands that form an asymmetric duplex region having an overhang at the 3′ terminus of the antisense strand. In some embodiments, the oligonucleotide comprises a sense strand and an antisense strand, wherein the termini of either or both strands comprise an overhang comprising one or more nucleotides. In some embodiments, the one or more nucleotides comprising the overhang are unpaired nucleotides. In some embodiments, the oligonucleotide herein comprises a sense strand and an antisense strand, wherein the 3′ termini of the sense strand and the 5′ termini of the antisense strand comprise a blunt end. In some embodiments, the oligonucleotide comprises a sense strand and an antisense strand, wherein the 5′ termini of the sense strand and the 3′ termini of the antisense strand comprise a blunt end.

[0382] In some embodiments, the oligonucleotide comprises a sense strand and an antisense strand, wherein a 3′ terminus of either or both strands comprises a 3′ overhang comprising one or more nucleotides. In some embodiments, the oligonucleotide comprises a sense strand and an antisense strand, wherein the sense strand comprises a 3′ overhang comprising one or more nucleotides. In some embodiments, the oligonucleotide comprises a sense strand and an antisense strand, wherein the antisense strand comprises a 3′ overhang comprising one or more nucleotides. In some embodiments, the oligonucleotide comprises a sense strand and an antisense strand, wherein both the sense strand and the antisense strand comprise a 3′ overhang comprising one or more nucleotides.

[0383] In some embodiments, the 3′ overhang is about 1 to about 20 nucleotides in length (e.g., about 1, 2, 3, 4, 5, 6, 7, 8, 9, 10, 11, 12, 13, 14, 15, 16, 17, 18, 19, or about 20 nucleotides in length). In some embodiments, the 3′ overhang is about 1 to 19, 1 to 18, 1 to 17, 1 to 16, 1 to 15, 1 to 14, 1 to 13, 1 to 12, 1 to 11, 1 to 10, 1 to 9, 1 to 8, 1 to 7, 1 to 6, 1 to 5, 1 to 4, 1 to 3, or 1 to 2 nucleotides in length. In some embodiments, the 3′ overhang is 1 nucleotide in length. In some embodiments, the 3′ overhang is 2 nucleotides in length. In some embodiments, the 3′ overhang is 3 nucleotides in length. In some embodiments, the 3′-overhang is 4 nucleotides in length. In some embodiments, the 3′ overhang is 5 nucleotides in length. In some embodiments, the 3′ overhang is 6 nucleotides in length. In some embodiments, the 3′ overhang is 7 nucleotides in length. In some embodiments, the 3′ overhang is 8 nucleotides in length. In some embodiments, the 3′ overhang is 9 nucleotides in length. In some embodiments, the 3′ overhang is 10 nucleotides in length. In some embodiments, the 3′ overhang is 11 nucleotides in length. In some embodiments, the 3′ overhang is 12 nucleotides in length. In some embodiments, the 3′ overhang is 13 nucleotides in length. In some embodiments, the 3′ overhang is 14 nucleotides in length. In some embodiments, the 3′ overhang is 15 nucleotides in length. In some embodiments, the 3′ overhang is 16 nucleotides in length. In some embodiments, the 3′ overhang is 17 nucleotides in length. In some embodiments, the 3′ overhang is 18 nucleotides in length. In some embodiments, the 3′ overhang is 19 nucleotides in length. In some embodiments, the 3′ overhang is 20 nucleotides in length.

[0384] In some embodiments, the oligonucleotide comprises a sense strand and an antisense strand, wherein the sense and antisense strands comprise nucleotide sequences selected from the group consisting of:
[0385] a) SEQ ID NOs: 1537 and 1572, respectively;
[0386] b) SEQ ID NOs: 1538 and 1573, respectively;
[0387] c) SEQ ID NOs: 1539 and 1574, respectively;
[0388] d) SEQ ID NOs: 1540 and 1575, respectively;
[0389] e) SEQ ID NOs: 1541 and 1576, respectively;
[0390] f) SEQ ID NOs: 1542 and 1577, respectively;
[0391] g) SEQ ID NOs: 1543 and 1578, respectively;
[0392] h) SEQ ID NOs: 1544 and 1579, respectively;
[0393] i) SEQ ID NOs: 1545 and 1580, respectively;
[0394] j) SEQ ID NOs: 1546 and 1581, respectively;
[0395] k) SEQ ID NOs: 1547 and 1582, respectively;
[0396] l) SEQ ID NOs: 1548 and 1583, respectively;
[0397] m) SEQ ID NOs: 1549 and 1584, respectively;
[0398] n) SEQ ID NOs: 1550 and 1585, respectively;
[0399] o) SEQ ID NOs: 1551 and 1586, respectively;
[0400] p) SEQ ID NOs: 1552 and 1587, respectively;
[0401] q) SEQ ID NOs: 1553 and 1588, respectively;
[0402] r) SEQ ID NOs: 1554 and 1589, respectively;
[0403] s) SEQ ID NOs: 1555 and 1590, respectively;
[0404] t) SEQ ID NOs: 1556 and 1591, respectively;
[0405] u) SEQ ID NOs: 1557 and 1592, respectively;
[0406] v) SEQ ID NOs: 1558 and 1593, respectively;
[0407] w) SEQ ID NOs: 1559 and 1594, respectively;
[0408] x) SEQ ID NOs: 1560 and 1595, respectively;
[0409] y) SEQ ID NOs: 1561 and 1596, respectively;
[0410] z) SEQ ID NOs: 1562 and 1597, respectively;
[0411] aa) SEQ ID NOs: 1563 and 1598, respectively;
[0412] bb) SEQ ID NOs: 1564 and 1599, respectively;
[0413] cc) SEQ ID NOs: 1565 and 1600, respectively;
[0414] dd) SEQ ID NOs: 1566 and 1601, respectively;
[0415] ee) SEQ ID NOs: 1567 and 1602, respectively;
[0416] ff) SEQ ID NOs: 1568 and 1603, respectively;
[0417] gg) SEQ ID NOs: 1569 and 1604, respectively;
[0418] hh) SEQ ID NOs: 1570 and 1605, respectively;
[0419] ii) SEQ ID NOs: 1571 and 1606, respectively; and
[0420] jj) SEQ ID NOs: 1681 and 1586, respectively,
   wherein the antisense strand comprises a 3′ overhang about 1 to about 20 nucleotides in length (e.g., about 1, 2, 3, 4, 5, 6, 7, 8, 9, 10, 11, 12, 13, 14, 15, 16, 17, 18, 19, or about 20 nucleotides in length), optionally wherein the 3′ overhang is 2 nucleotides in length.

[0421] In some embodiments, the oligonucleotide comprises a sense strand and an antisense strand, wherein the sense and antisense strands comprise nucleotide sequences selected from the group consisting of:
[0422] a) SEQ ID NOs: 1540 and 1575, respectively;
[0423] b) SEQ ID NOs: 1544 and 1579, respectively;
[0424] c) SEQ ID NOs: 1546 and 1581, respectively;
[0425] d) SEQ ID NOs: 1551 and 1586, respectively;
[0426] e) SEQ ID NOs: 1552 and 1587, respectively;
[0427] f) SEQ ID NOs: 1553 and 1588, respectively;
[0428] g) SEQ ID NOs: 1558 and 1594, respectively;
[0429] h) SEQ ID NOs: 1560 and 1595, respectively;
[0430] i) SEQ ID NOs: 1564 and 1599, respectively;
[0431] j) SEQ ID NOs: 1565 and 1600, respectively;
[0432] k) SEQ ID NOs: 1566 and 1601, respectively;
[0433] l) SEQ ID NOs: 1570 and 1605, respectively; and
[0434] m) SEQ ID NOs: 1681 and 1586, respectively,
   and wherein the antisense strand comprises a 3′-overhang about 1 to about 20 nucleotides in length (e.g., about 1, 2, 3, 4, 5, 6, 7, 8, 9, 10, 11, 12, 13, 14, 15, 16, 17, 18, 19, or about 20 nucleotides in length), optionally wherein the 3′ overhang is 2 nucleotides in length.

[0435] In some embodiments, the oligonucleotide comprises a sense strand and an antisense strand, wherein the sense and antisense strands comprise nucleotides sequences selected from the group consisting of:
[0436] a) SEQ ID NOs: 1553 and 1588, respectively;
[0437] b) SEQ ID NOs: 1560 and 1595, respectively;
[0438] c) SEQ ID NOs: 1564 and 1599, respectively;
[0439] d) SEQ ID NOs: 1551 and 1586, respectively;
[0440] e) SEQ ID NOs: 1570 and 1605, respectively; and
[0441] f) SEQ ID NOs: 1681 and 1586, respectively,
   wherein the antisense strand comprises a 3′ overhang about 1 to about 20 nucleotides in length (e.g., about 1, 2, 3, 4, 5, 6, 7, 8, 9, 10, 11, 12, 13, 14, 15, 16, 17, 18, 19, or about 20 nucleotides in length), optionally wherein the 3′ overhang is 2 nucleotides in length.

[0442] In some embodiments, the oligonucleotide comprises a sense strand and an antisense strand, wherein the sense strand comprises a 5′ overhang comprising one or more nucleotides.

[0443] In some embodiments, the oligonucleotide comprises a sense strand and an antisense strand, wherein the sense and antisense strands comprise nucleotide sequences selected from the group consisting of:
[0444] a) SEQ ID NOs: 1540 and 1575, respectively;
[0445] b) SEQ ID NOs: 1544 and 1579, respectively;
[0446] c) SEQ ID NOs: 1546 and 1581, respectively;
[0447] d) SEQ ID NOs: 1551 and 1586, respectively;
[0448] e) SEQ ID NOs: 1552 and 1587, respectively;
[0449] f) SEQ ID NOs: 1553 and 1588, respectively;
[0450] g) SEQ ID NOs: 1558 and 1594, respectively;
[0451] h) SEQ ID NOs: 1560 and 1595, respectively;
[0452] i) SEQ ID NOs: 1564 and 1599, respectively;
[0453] j) SEQ ID NOs: 1565 and 1600, respectively;
[0454] k) SEQ ID NOs: 1566 and 1601, respectively;
[0455] l) SEQ ID NOs: 1570 and 1605, respectively; and
[0456] m) SEQ ID NOs: 1681 and 1586, respectively,
   wherein the antisense strand comprises a 5′ overhang about 1 to about 20 nucleotides in length (e.g., about 1, 2, 3, 4, 5, 6, 7, 8, 9, 10, 11, 12, 13, 14, 15, 16, 17, 18, 19, or about 20 nucleotides in length), optionally wherein the 5′ overhang is 2 nucleotides in length.

[0457] In some embodiments, the oligonucleotide comprises a sense strand and an antisense strand, wherein the sense and antisense strands comprise nucleotide sequences selected from the group consisting of:
[0458] a) SEQ ID NOs: 1553 and 1588, respectively;
[0459] b) SEQ ID NOs: 1560 and 1595, respectively;
[0460] c) SEQ ID NOs: 1564 and 1599, respectively;
[0461] d) SEQ ID NOs: 1551 and 1586, respectively;
[0462] e) SEQ ID NOs: 1570 and 1605, respectively; and
[0463] f) SEQ ID NOs: 1681 and 1586, respectively,
   wherein the antisense strand comprises a 5′ overhang about 1 to about 20 nucleotides in length (e.g., about 1, 2, 3, 4, 5, 6, 7, 8, 9, 10, 11, 12, 13, 14, 15, 16, 17, 18, 19, or about 20 nucleotides in length), optionally wherein the 5′ overhang is 2 nucleotides in length.

[0464] In some embodiments, one or more (e.g., 2, 3, 4, 5, or more) nucleotides comprising the 3′ terminus or 5′ terminus of the sense and/or antisense strand are modified. For example, in some embodiments, one or two terminal nucleotides of the 3′ terminus of the antisense strand are modified. In some embodiments, the last nucleotide at the 3′ terminus of the antisense strand is modified (e.g., comprises a 2′ modification, e.g., a 2′-O-methoxyethyl). In some embodiments, the last one or two terminal nucleotides at the 3′ terminus of an antisense strand are complementary with the target. In some embodiments, the last one or two nucleotides at the 3′ terminus of the antisense strand are not complementary with the target.

[0465] In some embodiments, the oligonucleotide comprises a sense strand and an antisense strand, wherein the 3′ terminus of the sense strand comprises a stem-loop described herein, and the 3′ terminus of the antisense strand comprises a 3′ overhang. In some embodiments, the oligonucleotide comprises a sense strand and an antisense strand that form a nicked tetraL structure, wherein the 3′ terminus of the sense strand comprises a stem-loop, wherein the loop (L) is a tetraL described herein, and wherein the 3′ terminus of the antisense strand comprises a 3′ overhang described herein. In some embodiments, the 3′ overhang is 2 nucleotides in length. In some embodiments, the 2 nucleotides comprising the 3′ overhang both comprise guanine (G) nucleobases. Typically, one or both of the nucleotides comprising the 3′ overhang of the antisense strand are not complementary with the target mRNA.

### Oligonucleotide Modifications

[0466] In some embodiments, an oligonucleotide comprises a modification. Oligonucleotides (e.g., a RNAi oligonucleotide) may be modified in various ways to improve or control specificity, stability, delivery, bioavailability, resistance from nuclease degradation, immunogenicity, base-pairing properties, RNA distribution and cellular uptake, and other features relevant to therapeutic research use.

[0467] In some embodiments, the modification is a modified sugar. In some embodiments, the modification is a 5′-terminal phosphate group. In some embodiments, the modification is a modified internucleoside linkage. In some embodiments, the modification is a modified base. In some embodiments, the modification is a reversible modification. In some embodiments, the oligonucleotide can comprise any one of the modifications described herein or any combination thereof. For example, in some embodiments, the oligonucleotide comprises at least one modified sugar, a 5′ terminal phosphate group, at least one modified internucleoside linkage, at least one modified base, and at least one reversible modification.

[0468] In some embodiments, the oligonucleotide comprises at least one modified sugar, a 5′ terminal phosphate group, at least one modified internucleotide linkage, and at least one modified base. In some embodiments, the sense and antisense strands of the oligonucleotide comprise nucleotide sequences selected from the group consisting of:
[0469] a) SEQ ID NOs: 1537 and 1572, respectively;
[0470] b) SEQ ID NOs: 1538 and 1573, respectively;
[0471] c) SEQ ID NOs: 1539 and 1574, respectively;
[0472] d) SEQ ID NOs: 1540 and 1575, respectively;
[0473] e) SEQ ID NOs: 1541 and 1576, respectively;
[0474] f) SEQ ID NOs: 1542 and 1577, respectively;
[0475] g) SEQ ID NOs: 1543 and 1578, respectively;
[0476] h) SEQ ID NOs: 1544 and 1579, respectively;
[0477] i) SEQ ID NOs: 1545 and 1580, respectively;
[0478] j) SEQ ID NOs: 1546 and 1581, respectively;
[0479] k) SEQ ID NOs: 1547 and 1582, respectively;
[0480] l) SEQ ID NOs: 1548 and 1583, respectively;
[0481] m) SEQ ID NOs: 1549 and 1584, respectively;
[0482] n) SEQ ID NOs: 1550 and 1585, respectively;
[0483] o) SEQ ID NOs: 1551 and 1586, respectively;
[0484] p) SEQ ID NOs: 1552 and 1587, respectively;
[0485] q) SEQ ID NOs: 1553 and 1588, respectively;
[0486] r) SEQ ID NOs: 1554 and 1589, respectively;
[0487] s) SEQ ID NOs: 1555 and 1590, respectively;
[0488] t) SEQ ID NOs: 1556 and 1591, respectively;
[0489] u) SEQ ID NOs: 1557 and 1592, respectively;
[0490] v) SEQ ID NOs: 1558 and 1593, respectively;
[0491] w) SEQ ID NOs: 1559 and 1594, respectively;
[0492] x) SEQ ID NOs: 1560 and 1595, respectively;
[0493] y) SEQ ID NOs: 1561 and 1596, respectively;
[0494] z) SEQ ID NOs: 1562 and 1597, respectively;
[0495] aa) SEQ ID NOs: 1563 and 1598, respectively;
[0496] bb) SEQ ID NOs: 1564 and 1599, respectively;
[0497] cc) SEQ ID NOs: 1565 and 1600, respectively;
[0498] dd) SEQ ID NOs: 1566 and 1601, respectively;
[0499] ee) SEQ ID NOs: 1567 and 1602, respectively;
[0500] ff) SEQ ID NOs: 1568 and 1603, respectively;
[0501] gg) SEQ ID NOs: 1569 and 1604, respectively;
[0502] hh) SEQ ID NOs: 1570 and 1605, respectively;
[0503] ii) SEQ ID NOs: 1571 and 1606, respectively; and
[0504] jj) SEQ ID NOs: 1681 and 1586, respectively,
   wherein the oligonucleotide comprises at least one modified sugar, a 5′ terminal phosphate group, at least one modified internucleotide linkage, and at least one modified base.

[0505] In some embodiments, the sense and antisense strands comprise nucleotides sequences selected from the group consisting of:
[0506] a) SEQ ID NOs: 1540 and 1575, respectively;
[0507] b) SEQ ID NOs: 1544 and 1579, respectively;
[0508] c) SEQ ID NOs: 1546 and 1581, respectively;
[0509] d) SEQ ID NOs: 1551 and 1586, respectively;
[0510] e) SEQ ID NOs: 1552 and 1587, respectively;
[0511] f) SEQ ID NOs: 1553 and 1588, respectively;
[0512] g) SEQ ID NOs: 1558 and 1594, respectively;
[0513] h) SEQ ID NOs: 1560 and 1595, respectively;
[0514] i) SEQ ID NOs: 1564 and 1599, respectively;
[0515] j) SEQ ID NOs: 1565 and 1600, respectively;
[0516] k) SEQ ID NOs: 1566 and 1601, respectively;
[0517] l) SEQ ID NOs: 1570 and 1605, respectively; and
[0518] m) SEQ ID NOs: 1681 and 1586, respectively,
   wherein the oligonucleotide comprises at least one modified sugar, a 5′ terminal phosphate group, at least one modified internucleotide linkage, and at least one modified base.

[0519] In some embodiments, the sense and antisense strands comprise nucleotides sequences selected from the group consisting of:
[0520] a) SEQ ID NOs: 1553 and 1588, respectively;
[0521] b) SEQ ID NOs: 1560 and 1595, respectively;
[0522] c) SEQ ID NOs: 1564 and 1599, respectively;
[0523] d) SEQ ID NOs: 1551 and 1586, respectively;
[0524] e) SEQ ID NOs: 1570 and 1605, respectively; and
[0525] f) SEQ ID NOs: 1681 and 1586, respectively,
   wherein the oligonucleotide comprises at least one modified sugar, a 5′ terminal phosphate group, at least one modified internucleotide linkage, and at least one modified base.

[0526] The number of modifications on the oligonucleotide and the position of those nucleotide modifications may influence the properties of the oligonucleotide. For example, the oligonucleotide may be delivered in vivo by encompassing them in a lipid nanoparticle (LNP) or similar carrier. However, when the oligonucleotide is not protected by an LNP or similar carrier, it may be advantageous for at least some of the nucleotides to be modified. Accordingly, in some embodiments, all or substantially all of the nucleotides of the oligonucleotide are modified. In some embodiments, more than half of the nucleotides are modified. In some embodiments, less than half of the nucleotides are modified. In some embodiments, the sugar moiety of all nucleotides comprising the oligonucleotide is modified at the 2′ position. The modifications may be reversible or irreversible. In some embodiments, the oligonucleotide has a number and type of modified nucleotides sufficient to cause the desired characteristics (e.g., protection from enzymatic degradation, capacity to target a desired cell after in vivo administration, and/or thermodynamic stability).

### Sugar Modifications

[0527] In some embodiments, the oligonucleotide comprises a modified sugar. In some embodiments, the modified sugar (also referred herein to a sugar analog) includes a modified deoxyribose or ribose moiety in which, for example, one or more modifications occur at the 2′, 3′, 4′ and/or 5′ carbon position of the sugar. In some embodiments, the modified sugar may also include non-natural alternative carbon structures such as those present in locked nucleic acids (“LNA”; see, e.g., Koshkin et al. (1998) Tetrahedon 54:3607-30), unlocked nucleic acids (“UNA”; see, e.g., Snead et al. (2013) Mol. Ther-Nucl. Acids 2:e103) and bridged nucleic acids (“BNA”; see, e.g., Imanishi & Obika (2002) Chem Commun. (Camb) 21:1653-59).

[0528] In some embodiments, a nucleotide modification in the sugar comprises a 2′-modification. In some embodiments, the 2′-modification may be 2′-O-propargyl, 2′-O-propylamin, 2′-amino, 2′-ethyl, 2′-F, 2′-aminoethyl (EA), 2′-OMe, 2′-O-methoxyethyl (2′-MOE), 2′-O-[2-(methylamino)-2-oxoethyl] (2′-O-NMA) or 2′-deoxy-2′-fluoro-β-d-arabinonucleic acid (2′-FANA). In some embodiments, the modification is 2′-F, 2′-OMe or 2′-MOE. In some embodiments, the modified sugar comprises a modification of the sugar ring, which may comprise modification of one or more carbons of the sugar ring. For example, a modification of a sugar of a nucleotide may comprise a 2′-oxygen of a sugar is linked to a 1′-carbon or 4′-carbon of the sugar, or a 2′-oxygen is linked to the 1′-carbon or 4′-carbon via an ethylene or methylene bridge. In some embodiments, the modified nucleotide has an acyclic sugar that lacks a 2′-carbon to 3′-carbon bond. In some embodiments, the modified nucleotide has a thiol group (e.g., in the 4′ position of the sugar).

[0529] In some embodiments, the oligonucleotide comprises at least about 1 modified nucleotide (e.g., at least 1, at least 5, at least 10, at least 15, at least 20, at least 25, at least 30, at least 35, at least 40, at least 45, at least 50, at least 55, at least 60, or more). In some embodiments, the sense strand of the oligonucleotide comprises at least about 1 modified nucleotide (e.g., at least 1, at least at least 10, at least 15, at least 20, at least 25, at least 30, at least 35, or more). In some embodiments, the antisense strand of the oligonucleotide comprises at least about 1 modified nucleotide (e.g., at least 1, at least 5, at least 10, at least 15, at least 20, or more).

[0530] In some embodiments, all the nucleotides of the sense strand are modified. In some embodiments, all the nucleotides of the antisense strand are modified. In some embodiments, all the nucleotides (i.e., both the sense strand and the antisense strand) are modified. In some embodiments, the modified nucleotide comprises a 2′-modification (e.g., a 2′-F or 2′-OMe, 2′-MOE, and 2′-deoxy-2′-fluoro-(3-d-arabinonucleic acid). In some embodiments, the modified nucleotide comprises a 2′-modification (e.g., a 2′-F or 2′-OMe)

[0531] In some embodiments, the disclosure provides oligonucleotides having different modification patterns. In some embodiments, the oligonucleotides comprise a sense strand sequence having a modification pattern as set forth in the Examples and Sequence Listing and an antisense strand having a modification pattern as set forth in the Examples and Sequence Listing.

[0532] In some embodiments, the oligonucleotide comprises an antisense strand having nucleotides that are modified with 2′-F. In other embodiments, the oligonucleotide comprises an antisense strand having nucleotides that are modified with 2′-F and 2′-OMe. In some embodiments, the oligonucleotide comprises a sense strand having nucleotides that are modified with 2′-F. In other embodiments, the oligonucleotide comprises a sense strand having nucleotides that are modified with 2′-F and 2′-OMe.

[0533] In some embodiments, the oligonucleotide comprises a sense strand with about 10% to about 15%, or 10%, 11%, 12%, 13%, 14%, or 15% of the nucleotides of the sense strand comprising a 2′-F modification. In some embodiments, the oligonucleotide comprises a sense strand with about 18% to about 23%, or 18%, 19%, 20%, 21%, 22%, or 23% of the nucleotides comprising a 2′-F modification. In some embodiments, the oligonucleotide comprises a sense strand with about 38% to about 43%, or 38%, 39%, 40%, 41%, 42%, or 43% of the nucleotides comprising a 2′-F modification. In some embodiments, about 11% of the nucleotides of the sense strand comprise a 2-F modification. In some embodiments, about 22% of the nucleotides of the sense strand comprise a 2-F modification. In some embodiments, about 40% of the nucleotides of the sense strand comprise a 2-F modification.

[0534] In some embodiments, the oligonucleotide comprises an antisense strand with about 25% to about 35%, or 25%, 26%, 27%, 28%, 29%, 30%, 31%, 32%, 33%, 34%, or 35% of the nucleotides comprising a 2′-F modification. In some embodiments, about 32% of the nucleotides of the antisense strand comprise a 2′-F modification. In some embodiments, the oligonucleotide has about 15% to about 25%, or 15%, 16%, 17%, 18%, 19%, 20%, 21%, 22%, 23%, 24%, or 25% of the nucleotides comprising a 2′-F modification. In some embodiments, the oligonucleotide has about 35% to about 45%, or 35%, 36%, 37%, 38%, 39%, 40%, 41%, 42%, 43%, 44%, or 45% of the nucleotides comprising a 2′-F modification. In some embodiments, about 19% of the nucleotides comprise a 2′-F modification. In some embodiments, about 29% of the nucleotides comprise a 2′-F modification. In some embodiments, about 40% of the nucleotides comprise a 2′-F modification.

[0535] In some embodiments, one or more of positions 8, 9, 10, or 11 of a 36-nucleotide sense strand are modified with a 2′-F group. In some embodiments, one or more of positions 8, 9, 10, or 11 of a sense strand comprising a stem-loop are modified with a 2′-F group. In some embodiments, the sugar moiety at each of nucleotides at positions 1-7 and 12-20 of a 36-nucleotide sense strand is modified with a 2′-OMe. In some embodiments, the sugar moiety at each of nucleotides at positions 1-7 and 12-20 of a sense strand comprising a stem-loop is modified with a 2′-OMe. In some embodiments, the sugar moiety at each of nucleotides at positions 1-7 and 12-36 in the sense strand is modified with a 2′-OMe.

[0536] In some embodiments, one or more of positions 3, 5, 8, 10, 12, 13, 15, and 17 of the sense strand are modified with a 2′-F group.

[0537] In some embodiments, the antisense strand has 3 nucleotides that are modified at the 2′-position of the sugar moiety with a 2′-F. In some embodiments, the sugar moiety at positions 2, 5, and 14 and optionally up to 3 of the nucleotides at positions 1, 3, 7 and 10 of the antisense strand are modified with a 2′-F. In some embodiments, the sugar moiety at positions 2, 5, and 14 and optionally up to 3 of the nucleotides at positions 3, 4, 7 and 10 of the antisense strand are modified with a 2′-F. In other embodiments, the sugar moiety at each of the positions at positions 2, 5, and 14 of the antisense strand is modified with the 2′-F. In other embodiments, the sugar moiety at each of the positions at positions 1, 2, 5, and 14 of the antisense strand is modified with the 2′-F. In other embodiments, the sugar moiety at each of the positions at positions 2, 4, 5, and 14 of the antisense strand is modified with the 2′-F. In still other embodiments, the sugar moiety at each of the positions at positions 1, 2, 3, 5, 7, and 14 of the antisense strand is modified with the 2′-F. In other embodiments, the sugar moiety at each of the positions at positions 2, 3, 4, 5, 7, and 14 of the antisense strand is modified with the 2′-F. In yet another embodiment, the sugar moiety at each of the positions at positions 1, 2, 3, 5, 10, and 14 of the antisense strand is modified with the 2′-F. In other embodiments, the sugar moiety at each of the positions at positions 2, 3, 4, 5, 10, and 14 of the antisense strand is modified with the 2′-F. In another embodiment, the sugar moiety at each of the positions at positions 2, 3, 5, 7, 10, and 14 of the antisense strand is modified with the 2′-F. In other embodiments, the sugar moiety at each of the positions at positions 2, 3, 4, 5, 7, 10, and 14 of an antisense strand duplexed with a 36-nucleotide sense strand is modified with the 2′-F. In some embodiments, the sugar moiety at each of the positions at positions 2, 3, 4, 5, 7, 10, and 14 of the antisense strand duplexed with a sense strand comprising a stem-loop is modified with the 2′-F.

[0538] In some embodiments, the oligonucleotide comprises an antisense strand having the sugar moiety at positions 2 and 14 modified with 2′-F. In some embodiments, the oligonucleotide comprises an antisense strand having the sugar moiety at positions 2, 5, and 14 modified with 2′-F. In some embodiments, the oligonucleotide comprises an antisense strand having the sugar moiety at positions 1, 2, 5, and 14 modified with 2′-F. In some embodiments, the oligonucleotide comprises an antisense strand having the sugar moiety at positions 2, 4, 5, and 14 modified with 2′-F. In some embodiments, the oligonucleotide comprises an antisense strand having the sugar moiety at positions 1, 2, 3, 5, 7, and 14 modified with 2′-F. In some embodiments, the oligonucleotide comprises an antisense strand having the sugar moiety at positions 2, 3, 4, 5, 7, and 14 modified with 2′-F. In some embodiments, the oligonucleotide comprises an antisense strand having the sugar moiety at positions 1, 2, 3, 5, 10, and 14 modified with 2′-F. In some embodiments, the oligonucleotide comprises an antisense strand having the sugar moiety at positions 2, 3, 4, 5, 10, and 14 modified with 2′-F. In some embodiments, the oligonucleotide comprises a 36-nucleotide sense strand and an antisense strand, wherein the antisense strand comprises a sugar moiety at positions 2, 3, 4, 5, 7, 10, and 14 modified with 2′-F. In some embodiments, the oligonucleotide comprises a sense strand comprising a stem-loop and an antisense strand, wherein the antisense strand comprises a sugar moiety at positions 2, 3, 4, 5, 7, 10, and 14 modified with 2′-F. In some embodiments, the oligonucleotide comprises an antisense strand having the sugar moiety at positions 2, 3, 4, 5, 7, 10, 14, 16, and 19 modified with 2′-F.

[0539] In some embodiments, the oligonucleotide comprises an antisense strand having the sugar moiety of each of the nucleotides at positions 2, 5, and 14 modified with 2′-F and the sugar moiety of each of the remaining nucleotides of the antisense strand modified with a modification selected from the group consisting of 2′-O-propargyl, 2′-O-propylamin, 2′-amino, 2′-ethyl, EA, 2′-OMe, 2′-MOE, 2′-O-NMA, and 2′-FANA.

[0540] In some embodiments, the oligonucleotide comprises an antisense strand having the sugar moiety of each of the nucleotides at positions 1, 2, 5, and 14 modified with 2′-F and the sugar moiety of each of the remaining nucleotides of the antisense strand modified with a modification selected from the group consisting of 2′-O-propargyl, 2′-O-propylamin, 2′-amino, 2′-ethyl, EA, 2′-OMe, 2′-MOE, 2′-O-NMA, and 2′-FANA.

[0541] In some embodiments, the oligonucleotide comprises an antisense strand having the sugar moiety of each of the nucleotides at positions 2, 4, 5, and 14 modified with 2′-F and the sugar moiety of each of the remaining nucleotides of the antisense strand modified with a modification selected from the group consisting of 2′-O-propargyl, 2′-O-propylamin, 2′-amino, 2′-ethyl, EA, 2′-OMe, 2′-MOE, 2′-O-NMA, and 2′-FANA.

[0542] In some embodiments, the oligonucleotide comprises an antisense strand having the sugar moiety of each of the nucleotides at positions 1, 2, 3, 5, 7, and 14 modified with 2′-F and the sugar moiety of each of the remaining nucleotides of the antisense strand modified with a modification selected from the group consisting of 2′-O-propargyl, 2′-O-propylamin, 2′-amino, 2′-ethyl, EA, 2′-OMe, 2′-MOE, 2′-O-NMA, and 2′-FANA.

[0543] In some embodiments, the oligonucleotide comprises an antisense strand having the sugar moiety of each of the nucleotides at positions 2, 3, 4, 5, 7, and 14 modified with 2′-F and the sugar moiety of each of the remaining nucleotides of the antisense strand modified with a modification selected from the group consisting of 2′-O-propargyl, 2′-O-propylamin, 2′-amino, 2′-ethyl, EA, 2′-OMe, 2′-MOE, 2′-O-NMA, and 2′-FANA.

[0544] In some embodiments, the oligonucleotide comprises an antisense strand having the sugar moiety of each of the nucleotides at positions 1, 2, 3, 5, 10, and 14 modified with 2′-F and the sugar moiety of each of the remaining nucleotides of the antisense strand modified with a modification selected from the group consisting of 2′-O-propargyl, 2′-O-propylamin, 2′-amino, 2′-ethyl, EA, 2′-OMe, 2′-MOE, 2′-O-NMA, and 2′-FANA.

[0545] In some embodiments, the oligonucleotide comprises an antisense strand having the sugar moiety of each of the nucleotides at positions 2, 3, 4, 5, 10, and 14 modified with 2′-F and the sugar moiety of each of the remaining nucleotides of the antisense strand modified with a modification selected from the group consisting of 2′-O-propargyl, 2′-O-propylamin, 2′-amino, 2′-ethyl, EA, 2′-OMe, 2′-MOE, 2′-O-NMA, and 2′-FANA.

[0546] In some embodiments, the oligonucleotide comprises an antisense strand having the sugar moiety of each of the nucleotides at positions 2, 3, 5, 7, 10, and 14 modified with 2′-F and the sugar moiety of each of the remaining nucleotides of the antisense strand modified with a modification selected from the group consisting of 2′-O-propargyl, 2′-O-propylamin, 2′-amino, 2′-ethyl, EA, 2′-OMe, 2′-MOE, 2′-O-NMA, and 2′-FANA.

[0547] In some embodiments, the oligonucleotide comprises a 36-nucleotide sense strand and an antisense strand, wherein the antisense strand comprises a sugar moiety at positions 2, 3, 4, 5, 7, 10, and 14 modified with 2′-F and the sugar moiety of each of the remaining nucleotides of the antisense strand modified with a modification selected from the group consisting of 2′-O-propargyl, 2′-O-propylamin, 2′-amino, 2′-ethyl, EA, 2′-OMe, 2′-MOE, 2′-O-NMA, and 2′-FANA. In some embodiments, the oligonucleotide comprises a sense strand comprising a stem-loop and an antisense strand, wherein the antisense strand comprises a sugar moiety at positions 2, 3, 4, 5, 7, 10, and 14 modified with 2′-F and the sugar moiety of each of the remaining nucleotides of the antisense strand modified with a modification selected from the group consisting of 2′-O-propargyl, 2′-O-propylamin, 2′-amino, 2′-ethyl, EA, 2′-OMe, 2′-MOE, 2′-O-NMA, and 2′-FANA.

[0548] In some embodiments, the oligonucleotide comprises an antisense strand having the sugar moiety of each of the nucleotides at positions 2, 3, 4, 5, 7, 10, 14, 16, and 19 modified with 2′-F and the sugar moiety of each of the remaining nucleotides of the antisense strand modified with a modification selected from the group consisting of 2′-O-propargyl, 2′-O-propylamin, 2′-amino, 2′-ethyl, EA, 2′-OMe, 2′-MOE, 2′-O-NMA, and 2′-FANA.

[0549] In some embodiments, the oligonucleotide comprises an antisense strand having the sugar moiety at position 1, position 2, position 3, position 4, position 5, position 6, position 7, position 8, position 9, position 10, position 11, position 12, position 13, position 14, position 15, position 16, position 17, position 18, position 19, position 20, position 21, or position 22 modified with 2′-F.

[0550] In some embodiments, the oligonucleotide comprises an antisense strand having the sugar moiety at position 1, position 2, position 3, position 4, position 5, position 6, position 7, position 8, position 9, position 10, position 11, position 12, position 13, position 14, position 15, position 16, position 17, position 18, position 19, position 20, position 21, or position 22 modified with 2′-OMe.

[0551] In some embodiments, the oligonucleotide comprises an antisense strand having the sugar moiety at position 1, position 2, position 3, position 4, position 5, position 6, position 7, position 8, position 9, position 10, position 11, position 12, position 13, position 14, position 15, position 16, position 17, position 18, position 19, position 20, position 21, or position 22 modified with a modification selected from the group consisting of 2′-O-propargyl, 2′-O-propylamin, 2′-amino, 2′-ethyl, EA, 2′-OMe, 2′-MOE, 2′-O-NMA, and 2′-FANA.

[0552] In some embodiments, the oligonucleotide comprises a 36-nucleotide sense strand having the sugar moiety at positions 8-11 modified with 2′-F. In some embodiments, the oligonucleotide comprises a sense strand comprising a stem-loop and the sugar moiety at positions 8-11 modified with 2′-F. In some embodiments, the oligonucleotide comprises a 36-nucleotide sense strand having the sugar moiety at positions 1-7 and 12-17 or 12-20 modified with 2′-OMe. In some embodiments, the oligonucleotide comprises a sense strand comprising a stem-loop and the sugar moiety at positions 1-7 and 12-17 or 12-20 modified with 2′-OMe. In some embodiments, the oligonucleotide comprises a 36-nucleotide sense strand having the sugar moiety at positions 1-7 and 12-17, 12-20 or 12-22 modified with 2′-OMe. In some embodiments, the oligonucleotide comprises a sense strand comprising a stem-loop and the sugar moiety at positions 1-7 and 12-17, 12-20 or 12-22 modified with 2′-OMe. In some embodiments, the oligonucleotide comprises a 36-nucleotide sense strand having the sugar moiety of each of the nucleotides at positions 1-7 and 12-17 or 12-20 of the sense strand modified with a modification selected from the group consisting of 2′-O-propargyl, 2′-O-propylamin, 2′-amino, 2′-ethyl, EA, 2′-OMe, 2′-MOE, 2′-O-NMA, and 2′-FANA. In some embodiments, the oligonucleotide comprises a sense strand comprising a stem-loop and having the sugar moiety of each of the nucleotides at positions 1-7 and 12-17 or 12-20 of the sense strand modified with a modification selected from the group consisting of 2′-O-propargyl, 2′-O-propylamin, 2′-amino, 2′-ethyl, EA, 2′-OMe, 2′-MOE, 2′-O-NMA, and 2′-FANA. In some embodiments, the oligonucleotide comprises a 36-nucleotide sense strand having the sugar moiety of each of the nucleotides at positions 1-7 and 12-17, 12-20 or 12-22 of the sense strand modified with a modification selected from the group consisting of 2′-O-propargyl, 2′-O-propylamin, 2′-amino, 2′-ethyl, EA, 2′-OMe, 2′-MOE, 2′-O-NMA, and 2′-FANA. In some embodiments, the oligonucleotide comprises a sense strand comprising a stem-loop and the sugar moiety of each of the nucleotides at positions 1-7 and 12-17, 12-20 or 12-22 of the sense strand modified with a modification selected from the group consisting of 2′-O-propargyl, 2′-O-propylamin, 2′-amino, 2′-ethyl, EA, 2′-OMe, 2′-MOE, 2′-O-NMA, and 2′-FANA.

[0553] In some embodiments, the oligonucleotide comprises a sense strand having the sugar moiety at positions 3, 5, 8, 10, 12, 13, 15, and 17 modified with 2′-F. In some embodiments, the oligonucleotide comprises a sense strand having the sugar moiety at positions 1, 2, 4, 6, 7, 9, 11, 14, 16, and 18-20 modified with 2′-OMe. In some embodiments, the oligonucleotide comprises a sense strand having the sugar moiety of each of the nucleotides at positions 1, 2, 4, 6, 7, 9, 11, 14, 16, and 18-20 of the sense strand modified with a modification selected from the group consisting of 2′-O-propargyl, 2′-O-propylamin, 2′-amino, 2′-ethyl, EA, 2′-OMe, 2′-MOE, 2′-O-NMA, and 2′-FANA. In some embodiments, the oligonucleotide comprises a sense strand having the sugar moiety of each of the nucleotides at positions 1-7 and 12-17, 12-20 or 12-22 of the sense strand modified with a modification selected from the group consisting of 2′-O-propargyl, 2′-O-propylamin, 2′-amino, 2′-ethyl, EA, 2′-OMe, 2′-MOE, 2′-O-NMA, and 2′-FANA.

[0554] In some embodiments, the oligonucleotide comprises a sense strand having the sugar moiety at position 1, position 2, position 3, position 4, position 5, position 6, position 7, position 8, position 9, position 10, position 11, position 12, position 13, position 14, position 15, position 16, position 17, position 18, position 19, position 20, position 21, position 22, position 23, position 24, position 25, position 26, position 27, position 28, position 29, position 30, position 31, position 32, position 33, position 34, position 35, or position 36 modified with 2′-F.

[0555] In some embodiments, the oligonucleotide comprises a sense strand having the sugar moiety at position 1, position 2, position 3, position 4, position 5, position 6, position 7, position 8, position 9, position 10, position 11, position 12, position 13, position 14, position 15, position 16, position 17, position 18, position 19, position 20, position 21, position 22, position 23, position 24, position 25, position 26, position 27, position 28, position 29, position 30, position 31, position 32, position 33, position 34, position 35, or position 36 modified with 2′-OMe.

[0556] In some embodiments, the oligonucleotide comprises a sense strand having the sugar moiety at position 1, position 2, position 3, position 4, position 5, position 6, position 7, position 8, position 9, position 10, position 11, position 12, position 13, position 14, position 15, position 16, position 17, position 18, position 19, position 20, position 21, position 22, position 23, position 24, position 25, position 26, position 27, position 28, position 29, position 30, position 31, position 32, position 33, position 34, position 35, or position 36 modified with a modification selected from the group consisting of 2′-O-propargyl, 2′-O-propylamin, 2′-amino, 2′-ethyl, EA, 2′-OMe, 2′-MOE, 2′-O-NMA, and 2′-FANA.

[0557] In some embodiments, the oligonucleotide comprises an antisense strand having the sugar moiety of each of the nucleotides at positions 2, 3, 4, 5, 7, 10, and 14 of the antisense strand modified with 2′-F and the sugar moiety of each of the remaining nucleotides of the antisense strand modified with a modification selected from the group consisting of 2′-O-propargyl, 2′-O-propylamin, 2′-amino, 2′-ethyl, EA, 2′-OMe, 2′-MOE, 2′-O-NMA, and 2′-FANA; and a sense strand having the sugar moiety at each of the nucleotides at positions 8-11 of the sense strand modified with 2′-F and the sugar moiety of each of the remaining nucleotides of the sense strand modified with a modification selected from the group consisting of 2′-O-propargyl, 2′-O-propylamin, 2′-amino, 2′-ethyl, EA, 2′-OMe, 2′-MOE, 2′-O-NMA, and 2′-FANA. In some embodiments, the oligonucleotide comprises an antisense strand having the sugar moiety of each of the nucleotides at positions 2, 3, 4, 5, 7, 10, and 14 of the antisense strand modified with 2′-F and the sugar moiety of each of the remaining nucleotides of the antisense strand modified with a modification selected from the group consisting of 2′-O-propargyl, 2′-O-propylamin, 2′-amino, 2′-ethyl, EA, 2′-OMe, 2′-MOE, 2′-O-NMA, and 2′-FANA; and a sense strand having and stem-loop and the sugar moiety at each of the nucleotides at positions 8-11 of the sense strand modified with 2′-F and the sugar moiety of each of the remaining nucleotides of the sense strand modified with a modification selected from the group consisting of 2′-O-propargyl, 2′-O-propylamin, 2′-amino, 2′-ethyl, EA, 2′-OMe, 2′-MOE, 2′-O-NMA, and 2′-FANA.

[0558] In some embodiments, the oligonucleotide comprises an antisense strand having the sugar moiety of each of the nucleotides at positions 2, 3, 4, 5, 7, 10, 14, 16, and 19 of the antisense strand modified with 2′-F and the sugar moiety of each of the remaining nucleotides of the antisense strand modified with a modification selected from the group consisting of 2′-O-propargyl, 2′-O-propylamin, 2′-amino, 2′-ethyl, EA, 2′-OMe, 2′-MOE, 2′-O-NMA, and 2′-FANA; and a sense strand having the sugar moiety at each of the nucleotides at positions 3, 5, 8, 10, 12, 13, 15, and 17 of the sense strand modified with 2′-F and the sugar moiety of each of the remaining nucleotides of the sense strand modified with a modification selected from the group consisting of 2′-O-propargyl, 2′-O-propylamin, 2′-amino, 2′-ethyl, EA, 2′-OMe, 2′-MOE, 2′-O-NMA, and 2′-FANA.

[0559] In some embodiments, the sense and antisense strands of an oligonucleotide comprise nucleotides sequences selected from the group consisting of:
[0560] a) SEQ ID NOs: 1537 and 1572, respectively;
[0561] b) SEQ ID NOs: 1538 and 1573, respectively;
[0562] c) SEQ ID NOs: 1539 and 1574, respectively;
[0563] d) SEQ ID NOs: 1540 and 1575, respectively;
[0564] e) SEQ ID NOs: 1541 and 1576, respectively;
[0565] f) SEQ ID NOs: 1542 and 1577, respectively;
[0566] g) SEQ ID NOs: 1543 and 1578, respectively;
[0567] h) SEQ ID NOs: 1544 and 1579, respectively;
[0568] i) SEQ ID NOs: 1545 and 1580, respectively;
[0569] j) SEQ ID NOs: 1546 and 1581, respectively;
[0570] k) SEQ ID NOs: 1547 and 1582, respectively;
[0571] l) SEQ ID NOs: 1548 and 1583, respectively;
[0572] m) SEQ ID NOs: 1549 and 1584, respectively;
[0573] n) SEQ ID NOs: 1550 and 1585, respectively;
[0574] o) SEQ ID NOs: 1551 and 1586, respectively;
[0575] p) SEQ ID NOs: 1552 and 1587, respectively;
[0576] q) SEQ ID NOs: 1553 and 1588, respectively;
[0577] r) SEQ ID NOs: 1554 and 1589, respectively;
[0578] s) SEQ ID NOs: 1555 and 1590, respectively;
[0579] t) SEQ ID NOs: 1556 and 1591, respectively;
[0580] u) SEQ ID NOs: 1557 and 1592, respectively;
[0581] v) SEQ ID NOs: 1558 and 1593, respectively;
[0582] w) SEQ ID NOs: 1559 and 1594, respectively;
[0583] x) SEQ ID NOs: 1560 and 1595, respectively;
[0584] y) SEQ ID NOs: 1561 and 1596, respectively;
[0585] z) SEQ ID NOs: 1562 and 1597, respectively;
[0586] aa) SEQ ID NOs: 1563 and 1598, respectively;
[0587] bb) SEQ ID NOs: 1564 and 1599, respectively;
[0588] cc) SEQ ID NOs: 1565 and 1600, respectively;
[0589] dd) SEQ ID NOs: 1566 and 1601, respectively;
[0590] ee) SEQ ID NOs: 1567 and 1602, respectively;
[0591] ff) SEQ ID NOs: 1568 and 1603, respectively;
[0592] gg) SEQ ID NOs: 1569 and 1604, respectively;
[0593] hh) SEQ ID NOs: 1570 and 1605, respectively;
[0594] ii) SEQ ID NOs: 1571 and 1606, respectively; and
[0595] jj) SEQ ID NOs: 1681 and 1586, respectively,
   wherein one or more of positions 3, 5, 8, 10, 12, 13, 15, or 17 of the sense strand are modified with a 2′-F group.

[0596] In some embodiments, the sense and antisense strands of the oligonucleotide comprise nucleotides sequences selected from the group consisting of:
[0597] a) SEQ ID NOs: 1540 and 1575, respectively;
[0598] b) SEQ ID NOs: 1544 and 1579, respectively;
[0599] c) SEQ ID NOs: 1546 and 1581, respectively;
[0600] d) SEQ ID NOs: 1551 and 1586, respectively;
[0601] e) SEQ ID NOs: 1552 and 1587, respectively;
[0602] f) SEQ ID NOs: 1553 and 1588, respectively;
[0603] g) SEQ ID NOs: 1558 and 1594, respectively;
[0604] h) SEQ ID NOs: 1560 and 1595, respectively;
[0605] i) SEQ ID NOs: 1564 and 1599, respectively;
[0606] j) SEQ ID NOs: 1565 and 1600, respectively;
[0607] k) SEQ ID NOs: 1566 and 1601, respectively;
[0608] l) SEQ ID NOs: 1570 and 1605, respectively; and
[0609] m) SEQ ID NOs: 1681 and 1586, respectively,
   wherein one or more of positions 3, 5, 8, 10, 12, 13, 15, or 17 of the sense strand are modified with a 2′-F group.

[0610] In some embodiments, the sense and antisense strands of the oligonucleotide comprise nucleotides sequences selected from the group consisting of:

[0611] a) SEQ ID NOs: 1553 and 1588, respectively;
[0612] b) SEQ ID NOs: 1560 and 1595, respectively;
[0613] c) SEQ ID NOs: 1564 and 1599, respectively;
[0614] d) SEQ ID NOs: 1551 and 1586, respectively;
[0615] e) SEQ ID NOs: 1570 and 1605, respectively; and
[0616] f) SEQ ID NOs: 1681 and 1586, respectively,
   wherein one or more of positions 3, 5, 8, 10, 12, 13, 15, or 17 of the sense strand are modified with a 2′-F group.

### 5′-Terminal Phosphate

[0617] In some embodiments, an oligonucleotide described herein (e.g., an RNAi oligonucleotide) comprises a sense strand and an antisense strand, wherein the antisense strand comprises a 5′ terminal phosphate. In some embodiments, 5′ terminal phosphate groups enhance the interaction with Ago2. However, oligonucleotides comprising a 5′ phosphate group may be susceptible to degradation via phosphatases or other enzymes, which can limit their bioavailability in vivo. In some embodiments, oligonucleotides include analogs of 5′ phosphates that are resistant to such degradation. In some embodiments, the phosphate analog is oxymethyl phosphonate, vinyl phosphonate or malonyl phosphonate, or a combination thereof. In certain embodiments, the 5′ end of an oligonucleotide strand is attached to chemical moiety that mimics the electrostatic and steric properties of a natural 5′ phosphate group (“phosphate mimic”).

[0618] In some embodiments, the oligonucleotide has a phosphate analog at a 4′-carbon position of the sugar (referred to as a “4′-phosphate analog”). See, e.g., Intl. Patent Application Publication No. WO 2018/045317. In some embodiments, the oligonucleotide comprises a 4′-phosphate analog at a 5′ terminal nucleotide. In some embodiments, the phosphate analog is an oxymethyl phosphonate, in which the oxygen atom of the oxymethyl group is bound to the sugar moiety (e.g., at its 4′-carbon) or analog thereof. In other embodiments, the 4′-phosphate analog is a thiomethylphosphonate or an aminomethylphosphonate, in which the sulfur atom of the thiomethyl group or the nitrogen atom of the amino methyl group is bound to the 4′-carbon of the sugar moiety or analog thereof. In certain embodiments, the 4′-phosphate analog is an oxymethyl phosphonate. In some embodiments, the oxymethyl phosphonate is represented by the formula —O—CH₂—PO(OH)₂, —O—CH₂—PO(OR)₂, or —O—CH₂—POOH(R), in which R is independently selected from H, CH₃, an alkyl group, CH₂CH₂CN, CH₂OCOC(CH₃)₃, CH₂OCH₂CH₂Si (CH₃)₃ or a protecting group. In certain embodiments, the alkyl group is CH₂CH₃. More typically, R is independently selected from H, CH₃, or CH₂CH₃. In some embodiment, R is CH₃. In some embodiments, the 4′-phosphate analog is 4′-oxymethylphosphonate. In some embodiments, the modified nucleotide having the 4′-phosphonate analog is a uridine. In some embodiments, the modified nucleotide is 4′-O-monomethylphosphonate-2′-O-methyl uridine.

[0619] In some embodiments, the sense and antisense strands of the oligonucleotide comprise nucleotides sequences selected from the group consisting of:
[0620] a) SEQ ID NOs: 1537 and 1572, respectively;
[0621] b) SEQ ID NOs: 1538 and 1573, respectively;
[0622] c) SEQ ID NOs: 1539 and 1574, respectively;
[0623] d) SEQ ID NOs: 1540 and 1575, respectively;
[0624] e) SEQ ID NOs: 1541 and 1576, respectively;
[0625] f) SEQ ID NOs: 1542 and 1577, respectively;
[0626] g) SEQ ID NOs: 1543 and 1578, respectively;
[0627] h) SEQ ID NOs: 1544 and 1579, respectively;
[0628] i) SEQ ID NOs: 1545 and 1580, respectively;
[0629] j) SEQ ID NOs: 1546 and 1581, respectively;
[0630] k) SEQ ID NOs: 1547 and 1582, respectively;
[0631] l) SEQ ID NOs: 1548 and 1583, respectively;
[0632] m) SEQ ID NOs: 1549 and 1584, respectively;
[0633] n) SEQ ID NOs: 1550 and 1585, respectively;
[0634] o) SEQ ID NOs: 1551 and 1586, respectively;
[0635] p) SEQ ID NOs: 1552 and 1587, respectively;
[0636] q) SEQ ID NOs: 1553 and 1588, respectively;
[0637] r) SEQ ID NOs: 1554 and 1589, respectively;
[0638] s) SEQ ID NOs: 1555 and 1590, respectively;
[0639] t) SEQ ID NOs: 1556 and 1591, respectively;
[0640] u) SEQ ID NOs: 1557 and 1592, respectively;
[0641] v) SEQ ID NOs: 1558 and 1593, respectively;
[0642] w) SEQ ID NOs: 1559 and 1594, respectively;
[0643] x) SEQ ID NOs: 1560 and 1595, respectively;
[0644] y) SEQ ID NOs: 1561 and 1596, respectively;
[0645] z) SEQ ID NOs: 1562 and 1597, respectively;
[0646] aa) SEQ ID NOs: 1563 and 1598, respectively;
[0647] bb) SEQ ID NOs: 1564 and 1599, respectively;
[0648] cc) SEQ ID NOs: 1565 and 1600, respectively;
[0649] dd) SEQ ID NOs: 1566 and 1601, respectively;
[0650] ee) SEQ ID NOs: 1567 and 1602, respectively;
[0651] ff) SEQ ID NOs: 1568 and 1603, respectively;
[0652] gg) SEQ ID NOs: 1569 and 1604, respectively;
[0653] hh) SEQ ID NOs: 1570 and 1605, respectively;
[0654] ii) SEQ ID NOs: 1571 and 1606, respectively; and
[0655] jj) SEQ ID NOs: 1681 and 1586, respectively,
   wherein the oligonucleotide comprises a 5′-terminal phosphate, optionally a 5′-terminal phosphate analog.

[0656] In some embodiments, the sense and antisense strands of an oligonucleotide comprise nucleotides sequences selected from the group consisting of:
[0657] a) SEQ ID NOs: 1540 and 1575, respectively;
[0658] b) SEQ ID NOs: 1544 and 1579, respectively;
[0659] c) SEQ ID NOs: 1546 and 1581, respectively;
[0660] d) SEQ ID NOs: 1551 and 1586, respectively;
[0661] e) SEQ ID NOs: 1552 and 1587, respectively;
[0662] f) SEQ ID NOs: 1553 and 1588, respectively;
[0663] g) SEQ ID NOs: 1558 and 1594, respectively;
[0664] h) SEQ ID NOs: 1560 and 1595, respectively;
[0665] i) SEQ ID NOs: 1564 and 1599, respectively;
[0666] j) SEQ ID NOs: 1565 and 1600, respectively;
[0667] k) SEQ ID NOs: 1566 and 1601, respectively;
[0668] l) SEQ ID NOs: 1570 and 1605, respectively; and
[0669] m) SEQ ID NOs: 1681 and 1586, respectively,
   wherein the oligonucleotide comprises a 5′-terminal phosphate, optionally a 5′-terminal phosphate analog.

[0670] In some embodiments, the sense and antisense strands of the oligonucleotide comprise nucleotides sequences selected from the group consisting of:
[0671] a) SEQ ID NOs: 1553 and 1588, respectively;
[0672] b) SEQ ID NOs: 1560 and 1595, respectively;
[0673] c) SEQ ID NOs: 1564 and 1599, respectively;
[0674] d) SEQ ID NOs: 1551 and 1586, respectively;
[0675] e) SEQ ID NOs: 1570 and 1605, respectively; and
[0676] f) SEQ ID NOs: 1681 and 1586, respectively,
   wherein the oligonucleotide comprises a 5′-terminal phosphate, optionally a 5′-terminal phosphate analog.

[0677] In some embodiments, the oligonucleotide comprises an antisense strand comprising a 4′-phosphate analog at the 5′ terminal nucleotide, wherein 5′ terminal nucleotide comprises the following structure:

[chemical structure]

4′-O-monomethylphosphonate-2′-O-methyl uridine phosphorothioate [MePhosphonate-4O-mUs].

### Modified Internucleotide Linkage

[0678] In some embodiments, an oligonucleotide (e.g., a RNAi oligonucleotide) comprises a modified internucleotide linkage. In some embodiments, phosphate modifications or substitutions result in an oligonucleotide that comprises at least about 1 (e.g., at least 1, at least 2, at least 3, at least 4, or at least 5) modified internucleotide linkage. In some embodiments, the oligonucleotide comprises about 1 to about 10 (e.g., 1 to 10, 2 to 8, 4 to 6, 3 to 10, 5 to 10, 1 to 5, 1 to 3 or 1 to 2) modified internucleotide linkages. In some embodiments, the oligonucleotide comprises 1, 2, 3, 4, 6, 7, 8, 9, or 10 modified internucleotide linkages.

[0679] A modified internucleotide linkage may be a phosphorodithioate linkage, a phosphorothioate linkage, a phosphotriester linkage, a thionoalkylphosphonate linkage, a thionalkylphosphotriester linkage, a phosphoramidite linkage, a phosphonate linkage, or a boranophosphate linkage. In some embodiments, at least one modified internucleotide linkage is a phosphorothioate linkage.

[0680] In some embodiments, the oligonucleotide has a phosphorothioate linkage between one or more of positions 1 and 2 of the sense strand, positions 1 and 2 of the antisense strand, positions 2 and 3 of the antisense strand, positions 3 and 4 of the antisense strand, positions 20 and 21 of the antisense strand, and positions 21 and 22 of the antisense strand. In some embodiments, the oligonucleotide has a phosphorothioate linkage between each of positions 1 and 2 of the sense strand, positions 1 and 2 of the antisense strand, positions 2 and 3 of the antisense strand, positions and 21 of the antisense strand, and positions 21 and 22 of the antisense strand. In some embodiments, the oligonucleotide has a phosphorothioate linkage between each of (i) positions 1 and 2 of the sense strand; and (ii) positions 1 and 2, positions 2 and 3, positions 3 and 4, positions and 21, and positions 21 and 22 of the antisense strand.

[0681] In some embodiments, the sense and antisense strands of the oligonucleotide comprise nucleotides sequences selected from the group consisting of:
[0682] a) SEQ ID NOs: 1537 and 1572, respectively;
[0683] b) SEQ ID NOs: 1538 and 1573, respectively;
[0684] c) SEQ ID NOs: 1539 and 1574, respectively;
[0685] d) SEQ ID NOs: 1540 and 1575, respectively;
[0686] e) SEQ ID NOs: 1541 and 1576, respectively;
[0687] f) SEQ ID NOs: 1542 and 1577, respectively;
[0688] g) SEQ ID NOs: 1543 and 1578, respectively;
[0689] h) SEQ ID NOs: 1544 and 1579, respectively;
[0690] i) SEQ ID NOs: 1545 and 1580, respectively;
[0691] j) SEQ ID NOs: 1546 and 1581, respectively;
[0692] k) SEQ ID NOs: 1547 and 1582, respectively;
[0693] l) SEQ ID NOs: 1548 and 1583, respectively;
[0694] m) SEQ ID NOs: 1549 and 1584, respectively;
[0695] n) SEQ ID NOs: 1550 and 1585, respectively;
[0696] o) SEQ ID NOs: 1551 and 1586, respectively;
[0697] p) SEQ ID NOs: 1552 and 1587, respectively;
[0698] q) SEQ ID NOs: 1553 and 1588, respectively;
[0699] r) SEQ ID NOs: 1554 and 1589, respectively;
[0700] s) SEQ ID NOs: 1555 and 1590, respectively;
[0701] t) SEQ ID NOs: 1556 and 1591, respectively;
[0702] u) SEQ ID NOs: 1557 and 1592, respectively;
[0703] v) SEQ ID NOs: 1558 and 1593, respectively;
[0704] w) SEQ ID NOs: 1559 and 1594, respectively;
[0705] x) SEQ ID NOs: 1560 and 1595, respectively;
[0706] y) SEQ ID NOs: 1561 and 1596, respectively;
[0707] z) SEQ ID NOs: 1562 and 1597, respectively;
[0708] aa) SEQ ID NOs: 1563 and 1598, respectively;
[0709] bb) SEQ ID NOs: 1564 and 1599, respectively;
[0710] cc) SEQ ID NOs: 1565 and 1600, respectively;
[0711] dd) SEQ ID NOs: 1566 and 1601, respectively;
[0712] ee) SEQ ID NOs: 1567 and 1602, respectively;
[0713] ff) SEQ ID NOs: 1568 and 1603, respectively;
[0714] gg) SEQ ID NOs: 1569 and 1604, respectively;
[0715] hh) SEQ ID NOs: 1570 and 1605, respectively;
[0716] ii) SEQ ID NOs: 1571 and 1606, respectively; and
[0717] jj) SEQ ID NOs: 1681 and 1586, respectively,
   wherein the oligonucleotide comprises a modified internucleotide linkage.

[0718] In some embodiments, the sense and antisense strands of the oligonucleotide comprise nucleotides sequences selected from the group consisting of:
[0719] a) SEQ ID NOs: 1540 and 1575, respectively;
[0720] b) SEQ ID NOs: 1544 and 1579, respectively;
[0721] c) SEQ ID NOs: 1546 and 1581, respectively;
[0722] d) SEQ ID NOs: 1551 and 1586, respectively;
[0723] e) SEQ ID NOs: 1552 and 1587, respectively;
[0724] f) SEQ ID NOs: 1553 and 1588, respectively;
[0725] g) SEQ ID NOs: 1558 and 1594, respectively;
[0726] h) SEQ ID NOs: 1560 and 1595, respectively;
[0727] i) SEQ ID NOs: 1564 and 1599, respectively;
[0728] j) SEQ ID NOs: 1565 and 1600, respectively;
[0729] k) SEQ ID NOs: 1566 and 1601, respectively;
[0730] l) SEQ ID NOs: 1570 and 1605, respectively; and
[0731] m) SEQ ID NOs: 1681 and 1586, respectively,
   wherein the oligonucleotide comprises a modified internucleotide linkage.

[0732] In some embodiments, the sense and antisense strands of the oligonucleotide comprise nucleotides sequences selected from the group consisting of:
[0733] a) SEQ ID NOs: 1553 and 1588, respectively;
[0734] b) SEQ ID NOs: 1560 and 1595, respectively;
[0735] c) SEQ ID NOs: 1564 and 1599, respectively;
[0736] d) SEQ ID NOs: 1551 and 1586, respectively;
[0737] e) SEQ ID NOs: 1570 and 1605, respectively; and
[0738] f) SEQ ID NOs: 1681 and 1586, respectively,
   wherein the oligonucleotide comprises a modified internucleotide linkage.

### Base Modifications

[0739] In some embodiments, an oligonucleotide herein (e.g., a RNAi oligonucleotide) has one or more modified nucleobases. In some embodiments, modified nucleobases (also referred to herein as base analogs) are linked at the 1′ position of a nucleotide sugar moiety. In certain embodiments, a modified nucleobase is a nitrogenous base. In certain embodiments, a modified nucleobase does not contain nitrogen atom. See, e.g., US Patent Application Publication No. 2008/0274462. In some embodiments, a modified nucleotide comprises a universal base. In some embodiments, a modified nucleotide does not contain a nucleobase (abasic).

[0740] In some embodiments, the sense and antisense strands of the oligonucleotide comprise nucleotides sequences selected from the group consisting of:
[0741] a) SEQ ID NOs: 1537 and 1572, respectively;
[0742] b) SEQ ID NOs: 1538 and 1573, respectively;
[0743] c) SEQ ID NOs: 1539 and 1574, respectively;
[0744] d) SEQ ID NOs: 1540 and 1575, respectively;
[0745] e) SEQ ID NOs: 1541 and 1576, respectively;
[0746] f) SEQ ID NOs: 1542 and 1577, respectively;
[0747] g) SEQ ID NOs: 1543 and 1578, respectively;
[0748] h) SEQ ID NOs: 1544 and 1579, respectively;
[0749] i) SEQ ID NOs: 1545 and 1580, respectively;
[0750] j) SEQ ID NOs: 1546 and 1581, respectively;
[0751] k) SEQ ID NOs: 1547 and 1582, respectively;
[0752] l) SEQ ID NOs: 1548 and 1583, respectively;
[0753] m) SEQ ID NOs: 1549 and 1584, respectively;
[0754] n) SEQ ID NOs: 1550 and 1585, respectively;
[0755] o) SEQ ID NOs: 1551 and 1586, respectively;
[0756] p) SEQ ID NOs: 1552 and 1587, respectively;
[0757] q) SEQ ID NOs: 1553 and 1588, respectively;
[0758] r) SEQ ID NOs: 1554 and 1589, respectively;
[0759] s) SEQ ID NOs: 1555 and 1590, respectively;
[0760] t) SEQ ID NOs: 1556 and 1591, respectively;
[0761] u) SEQ ID NOs: 1557 and 1592, respectively;
[0762] v) SEQ ID NOs: 1558 and 1593, respectively;
[0763] w) SEQ ID NOs: 1559 and 1594, respectively;
[0764] x) SEQ ID NOs: 1560 and 1595, respectively;
[0765] y) SEQ ID NOs: 1561 and 1596, respectively;
[0766] z) SEQ ID NOs: 1562 and 1597, respectively;
[0767] aa) SEQ ID NOs: 1563 and 1598, respectively;
[0768] bb) SEQ ID NOs: 1564 and 1599, respectively;
[0769] cc) SEQ ID NOs: 1565 and 1600, respectively;
[0770] dd) SEQ ID NOs: 1566 and 1601, respectively;
[0771] ee) SEQ ID NOs: 1567 and 1602, respectively;
[0772] ff) SEQ ID NOs: 1568 and 1603, respectively;
[0773] gg) SEQ ID NOs: 1569 and 1604, respectively;
[0774] hh) SEQ ID NOs: 1570 and 1605, respectively;
[0775] ii) SEQ ID NOs: 1571 and 1606, respectively; and
[0776] jj) SEQ ID NOs: 1681 and 1586, respectively,
   wherein the oligonucleotide comprises one or more modified nucleobases.

[0777] In some embodiments, the sense and antisense strands of an oligonucleotide comprise nucleotides sequences selected from the group consisting of:
[0778] a) SEQ ID NOs: 1540 and 1575, respectively;
[0779] b) SEQ ID NOs: 1544 and 1579, respectively;
[0780] c) SEQ ID NOs: 1546 and 1581, respectively;
[0781] d) SEQ ID NOs: 1551 and 1586, respectively;
[0782] e) SEQ ID NOs: 1552 and 1587, respectively;
[0783] f) SEQ ID NOs: 1553 and 1588, respectively;
[0784] g) SEQ ID NOs: 1558 and 1594, respectively;
[0785] h) SEQ ID NOs: 1560 and 1595, respectively;
[0786] i) SEQ ID NOs: 1564 and 1599, respectively;
[0787] j) SEQ ID NOs: 1565 and 1600, respectively;
[0788] k) SEQ ID NOs: 1566 and 1601, respectively;
[0789] l) SEQ ID NOs: 1570 and 1605, respectively; and
[0790] m) SEQ ID NOs: 1681 and 1586, respectively,
   wherein the oligonucleotide comprises one or more modified nucleobases.

[0791] In some embodiments, the sense and antisense strands of an oligonucleotide comprise nucleotides sequences selected from the group consisting of:
[0792] a) SEQ ID NOs: 1553 and 1588, respectively;
[0793] b) SEQ ID NOs: 1560 and 1595, respectively;
[0794] c) SEQ ID NOs: 1564 and 1599, respectively;
[0795] d) SEQ ID NOs: 1551 and 1586, respectively;
[0796] e) SEQ ID NOs: 1570 and 1605, respectively; and
[0797] f) SEQ ID NOs: 1681 and 1586, respectively,
   wherein the oligonucleotide comprises one or more modified nucleobases.

[0798] In some embodiments, a universal base is a heterocyclic moiety located at the 1′ position of a nucleotide sugar moiety in a modified nucleotide, or the equivalent position in a nucleotide sugar moiety substitution, that, when present in a duplex, can be positioned opposite more than one type of base without substantially altering structure of the duplex. In some embodiments, compared to a reference ss nucleic acid (e.g., oligonucleotide) that is fully complementary to a target nucleic acid, a ss nucleic acid containing a universal base forms a duplex with the target nucleic acid that has a lower Tₘ than a duplex formed with the complementary nucleic acid. In some embodiments, when compared to a reference ss nucleic acid in which the universal base has been replaced with a base to generate a single mismatch, the ss nucleic acid containing the universal base forms a duplex with the target nucleic acid that has a higher Tₘ than a duplex formed with the nucleic acid comprising the mismatched base.

[0799] Non-limiting examples of universal-binding nucleotides include, but are not limited to, inosine, 1-β-D-ribofuranosyl-5-nitroindole and/or 1-β-D-ribofuranosyl-3-nitropyrrole (see, US Patent Application Publication No. 2007/0254362; Van Aerschot et al. (1995) Nucleic Acids Res. 23:4363-4370; Loakes et al. (1995) Nucleic Acids Res. 23:2361-66; and Loakes & Brown (1994) Nucleic Acids Res. 22:4039-43).

### Targeting Ligands

[0800] In some embodiments, it is desirable to target the oligonucleotide (e.g., a RNAi oligonucleotide) to one or more cells or one or more organs. Such a strategy can help to avoid undesirable effects in other organs or avoid undue loss of the oligonucleotide to cells, tissue, or organs that would not benefit from the oligonucleotide. Accordingly, in some embodiments, the oligonucleotide is modified to facilitate targeting and/or delivery to a particular tissue, cell, or organ (e.g., to facilitate delivery of the oligonucleotide to the CNS). In some embodiments, the oligonucleotide comprises at least one nucleotide (e.g., 1, 2, 3, 4, 5, 6 or more nucleotides) conjugated to one or more targeting ligand(s). In some embodiments, the sense and antisense strands of the oligonucleotide comprise nucleotides sequences selected from the group consisting of:
[0801] a) SEQ ID NOs: 1537 and 1572, respectively;
[0802] b) SEQ ID NOs: 1538 and 1573, respectively;
[0803] c) SEQ ID NOs: 1539 and 1574, respectively;
[0804] d) SEQ ID NOs: 1540 and 1575, respectively;
[0805] e) SEQ ID NOs: 1541 and 1576, respectively;
[0806] f) SEQ ID NOs: 1542 and 1577, respectively;
[0807] g) SEQ ID NOs: 1543 and 1578, respectively;
[0808] h) SEQ ID NOs: 1544 and 1579, respectively;
[0809] i) SEQ ID NOs: 1545 and 1580, respectively;
[0810] j) SEQ ID NOs: 1546 and 1581, respectively;
[0811] k) SEQ ID NOs: 1547 and 1582, respectively;
[0812] l) SEQ ID NOs: 1548 and 1583, respectively;
[0813] m) SEQ ID NOs: 1549 and 1584, respectively;
[0814] n) SEQ ID NOs: 1550 and 1585, respectively;
[0815] o) SEQ ID NOs: 1551 and 1586, respectively;
[0816] p) SEQ ID NOs: 1552 and 1587, respectively;
[0817] q) SEQ ID NOs: 1553 and 1588, respectively;
[0818] r) SEQ ID NOs: 1554 and 1589, respectively;
[0819] s) SEQ ID NOs: 1555 and 1590, respectively;
[0820] t) SEQ ID NOs: 1556 and 1591, respectively;
[0821] u) SEQ ID NOs: 1557 and 1592, respectively;
[0822] v) SEQ ID NOs: 1558 and 1593, respectively;
[0823] w) SEQ ID NOs: 1559 and 1594, respectively;
[0824] x) SEQ ID NOs: 1560 and 1595, respectively;
[0825] y) SEQ ID NOs: 1561 and 1596, respectively;
[0826] z) SEQ ID NOs: 1562 and 1597, respectively;
[0827] aa) SEQ ID NOs: 1563 and 1598, respectively;
[0828] bb) SEQ ID NOs: 1564 and 1599, respectively;
[0829] cc) SEQ ID NOs: 1565 and 1600, respectively;
[0830] dd) SEQ ID NOs: 1566 and 1601, respectively;
[0831] ee) SEQ ID NOs: 1567 and 1602, respectively;
[0832] ff) SEQ ID NOs: 1568 and 1603, respectively;
[0833] gg) SEQ ID NOs: 1569 and 1604, respectively;
[0834] hh) SEQ ID NOs: 1570 and 1605, respectively;
[0835] ii) SEQ ID NOs: 1571 and 1606, respectively; and
[0836] jj) SEQ ID NOs: 1681 and 1586, respectively,
   wherein the oligonucleotide comprises a targeting ligand conjugated to at least one nucleotide.

[0837] In some embodiments, the oligonucleotide comprises at least one nucleotide (e.g., 1, 2, 3, 4, 5, 6 or more nucleotides) conjugated to one or more targeting ligand(s). In some embodiments, the sense and antisense strands of the oligonucleotide comprise nucleotides sequences selected from the group consisting of:
[0838] a) SEQ ID NOs: 1540 and 1575, respectively;
[0839] b) SEQ ID NOs: 1544 and 1579, respectively;
[0840] c) SEQ ID NOs: 1546 and 1581, respectively;
[0841] d) SEQ ID NOs: 1551 and 1586, respectively;
[0842] e) SEQ ID NOs: 1552 and 1587, respectively;
[0843] f) SEQ ID NOs: 1553 and 1588, respectively;
[0844] g) SEQ ID NOs: 1558 and 1594, respectively;
[0845] h) SEQ ID NOs: 1560 and 1595, respectively;
[0846] i) SEQ ID NOs: 1564 and 1599, respectively;
[0847] j) SEQ ID NOs: 1565 and 1600, respectively;
[0848] k) SEQ ID NOs: 1566 and 1601, respectively;
[0849] l) SEQ ID NOs: 1570 and 1605, respectively; and
[0850] m) SEQ ID NOs: 1681 and 1586, respectively,
   wherein the oligonucleotide comprises a targeting ligand conjugated to at least one nucleotide.

[0851] In some embodiments, the oligonucleotide comprises at least one nucleotide (e.g., 1, 2, 3, 4, 5, 6 or more nucleotides) conjugated to one or more targeting ligand(s). In some embodiments, the sense and antisense strands of the oligonucleotide comprise nucleotides sequences selected from the group consisting of:
[0852] a) SEQ ID NOs: 1553 and 1588, respectively;
[0853] b) SEQ ID NOs: 1560 and 1595, respectively;
[0854] c) SEQ ID NOs: 1564 and 1599, respectively;
[0855] d) SEQ ID NOs: 1551 and 1586, respectively;
[0856] e) SEQ ID NOs: 1570 and 1605, respectively; and,
[0857] f) SEQ ID NOs: 1681 and 1586, respectively,
   wherein the oligonucleotide comprises a targeting ligand conjugated to at least one nucleotide.

[0858] In some embodiments, the targeting ligand comprises a carbohydrate, amino sugar, cholesterol, peptide, polypeptide, or protein or part of a protein (e.g., an antibody or antibody fragment). In some embodiments, the targeting ligand is an aptamer. For example, a targeting ligand may be a RGD peptide that is used to target tumor vasculature or glioma cells, CREKA peptide to target tumor vasculature or stoma, transferring, lactoferrin, or an aptamer to target transferrin receptors expressed on CNS vasculature, or an anti-EGFR antibody to target EGFR on glioma cells. In certain embodiments, the targeting ligand is one or more GalNAc moieties. In some embodiments, the targeting ligand is one or more lipid moieties.

[0859] In some embodiments, 1 or more (e.g., 1, 2, 3, 4, 5, or 6) nucleotides of the oligonucleotide are each conjugated to a separate targeting ligand. In some embodiments, 2 to 4 nucleotides of the oligonucleotide are each conjugated to a separate targeting ligand. In some embodiments, targeting ligands are conjugated to 2 to 4 nucleotides at either ends of the sense or antisense strand (e.g., targeting ligands are conjugated to a 2 to 4 nucleotide overhang or extension on the 5′ or 3′ end of the sense or antisense strand) such that the targeting ligands resemble bristles of a toothbrush, and the oligonucleotide resembles a toothbrush. For example, the oligonucleotide may comprise a stem-loop at either the 5′ or 3′ end of the sense strand and 1, 2, 3, or 4 nucleotides of the loop of the stem may be individually conjugated to a targeting ligand. In some embodiments, the oligonucleotide comprises a stem-loop at the 3′ end of the sense strand, wherein the loop of the stem-loop comprises a triL or a tetraL, and wherein the 3 or 4 nucleotides comprising the triL or tetraL, respectfully, are individually conjugated to a targeting ligand. In some embodiments, the oligonucleotide comprises a blunt end at its 3′ end and one or more targeting ligands conjugated to at least one nucleotide. In some embodiments, the oligonucleotide comprises a blunt end at its 3′ end and one or more targeting ligands conjugated to the 5′ terminal nucleotide of the sense strand.

### GalNAc Conjugation

[0860] GalNAc is a high affinity ligand for the ASGPR, which is primarily expressed on the sinusoidal surface of hepatocyte cells and has a major role in binding, internalizing and subsequent clearing circulating glycoproteins that contain terminal galactose or GalNAc residues (asialoglycoproteins). Conjugation (either indirect or direct) of GalNAc moieties to an oligonucleotide herein (e.g., a RNAi oligonucleotide) can be used to target the oligonucleotide to the ASGPR expressed on cells. In some embodiments, the oligonucleotide is conjugated to at least one or more GalNAc moieties, wherein the GalNAc moieties target the oligonucleotide to an ASGPR expressed on human liver cells (e.g., human hepatocytes). In some embodiments, the GalNAc moiety targets the oligonucleotide to the liver.

[0861] In some embodiments, the oligonucleotide is conjugated directly or indirectly to a monovalent GalNAc. In some embodiments, the oligonucleotide is conjugated directly or indirectly to more than one monovalent GalNAc (i.e., is conjugated to 2, 3, or 4 monovalent GalNAc moieties, and is typically conjugated to 3 or 4 monovalent GalNAc moieties). In some embodiments, the oligonucleotide is conjugated to one or more bivalent GalNAc, trivalent GalNAc, or tetravalent GalNAc moieties. In some embodiments, the bivalent, trivalent, or tetravalent GalNAc moiety is conjugated to the oligonucleotide via a branched linker. In some embodiments, the monovalent GalNAc moiety is conjugated to a first nucleotide and the bivalent, trivalent, or tetravalent GalNAc moiety is conjugated to a second nucleotide via a branched linker.

[0862] In some embodiments, 1 or more (e.g., 1, 2, 3, 4, 5, or 6) nucleotides of the oligonucleotide are each conjugated to a GalNAc moiety. In some embodiments, 2 to 4 nucleotides of a tetraL are each conjugated to a separate GalNAc. In some embodiments, 1 to 3 nucleotides of a triL are each conjugated to a separate GalNAc. In some embodiments, targeting ligands are conjugated to 2 to 4 nucleotides at either ends of the sense or antisense strand (e.g., ligands are conjugated to a 2 to 4 nucleotide overhang or extension on the 5′ or 3′ end of the sense or antisense strand) such that the GalNAc moieties resemble bristles of a toothbrush, and the oligonucleotide resembles a toothbrush. In some embodiments, GalNAc moieties are conjugated to a nucleotide of the sense strand. For example, 4 GalNAc moieties can be conjugated to nucleotides in the tetraL of the sense strand where each GalNAc moiety is conjugated to 1 nucleotide.

[0863] In some embodiments, the oligonucleotide comprises a tetraL, wherein the tetraL is any combination of adenine (A) and guanine (G) nucleotides. In some embodiments, the tetraL comprises a monovalent GalNAc moiety attached to any one or more guanine (G) nucleotides of the tetraloop via any linker described herein, as depicted below (X=heteroatom):

[chemical structure]

[0864] In some embodiments, the tetraL has a monovalent GalNAc attached to any one or more adenine nucleotides of the tetraL via any linker described herein, as depicted below (X=heteroatom):

[chemical structure]

[0865] In some embodiments, the oligonucleotide comprises a monovalent GalNAc attached to a guanine (G) nucleotide referred to as [ademG-GalNAc] or 2′-aminodiethoxymethanol-Guanine-GalNAc, as depicted below:

[chemical structure]

[0866] In some embodiments, the oligonucleotide comprises a monovalent GalNAc attached to an adenine (A) nucleotide, referred to as [ademA-GalNAc] or 2′-aminodiethoxymethanol-Adenine-GalNAc, as depicted below:

[chemical structure]

[0867] An example of such conjugation is shown below for a loop comprising from 5′ to 3′ the nucleotide sequence GAAA (L=linker, X=heteroatom) stem attachment points are shown. Such a loop may be present, for example, at positions 27-30 of the sense strand of any one of the sense strands listed in Tables 4 and 5. In the chemical formula,

[chemical structure]

is used to describe an attachment point to the oligonucleotide strand.

[chemical structure]

[0868] Appropriate methods or chemistry (e.g., click chemistry) can be used to link the targeting ligand to a nucleotide. In some embodiments, the targeting ligand is conjugated to a nucleotide using a click linker. In some embodiments, an acetal-based linker is used to conjugate a targeting ligand to a nucleotide of any one of the oligonucleotides described herein. Acetal-based linkers are disclosed, for example, in Intl. Patent Application Publication No. WO 2016/100401. In some embodiments, the linker is a labile linker. However, in other embodiments, the linker is stable. Examples are shown below for a loop comprising from 5′ to 3′ the nucleotides GAAA, in which GalNAc moieties are attached to 3 or 4 nucleotides of the loop using an acetal linker. Such a loop may be present, for example, at positions 27-30 of the any one of the sense strands listed in Tables 4 and 5 In the chemical formula,

[chemical structure]

is an attachment point to the oligonucleotide strand:

[chemical structure]

[chemical structure]

[0869] As mentioned, various appropriate methods or chemistry synthetic techniques (e.g., click chemistry) can be used to link the targeting ligand to a nucleotide. In some embodiments, the targeting ligand is conjugated to a nucleotide using a click linker. In some embodiments, an acetal-based linker is used to conjugate the targeting ligand to a nucleotide of any one of the oligonucleotides described herein. Acetal-based linkers are disclosed, for example, in Intl. Patent Application Publication No. WO 2016/100401. In some embodiments, the linker is a labile linker. However, in other embodiments, the linker is a stable linker.

[0870] In some embodiments, a duplex extension (e.g., of up to 3, 4, 5, or 6 bp in length) is provided between the targeting ligand (e.g., a GalNAc moiety) and the oligonucleotide. In some embodiments, the oligonucleotide does not have a GalNAc conjugated thereto.

[0871] In some embodiments, the sense and antisense strands of an oligonucleotide comprise nucleotides sequences selected from the group consisting of:
[0872] a) SEQ ID NOs: 1537 and 1572, respectively;
[0873] b) SEQ ID NOs: 1538 and 1573, respectively;
[0874] c) SEQ ID NOs: 1539 and 1574, respectively;
[0875] d) SEQ ID NOs: 1540 and 1575, respectively;
[0876] e) SEQ ID NOs: 1541 and 1576, respectively;
[0877] f) SEQ ID NOs: 1542 and 1577, respectively;
[0878] g) SEQ ID NOs: 1543 and 1578, respectively;
[0879] h) SEQ ID NOs: 1544 and 1579, respectively;
[0880] i) SEQ ID NOs: 1545 and 1580, respectively;
[0881] j) SEQ ID NOs: 1546 and 1581, respectively;
[0882] k) SEQ ID NOs: 1547 and 1582, respectively;
[0883] l) SEQ ID NOs: 1548 and 1583, respectively;
[0884] m) SEQ ID NOs: 1549 and 1584, respectively;
[0885] n) SEQ ID NOs: 1550 and 1585, respectively;
[0886] o) SEQ ID NOs: 1551 and 1586, respectively;
[0887] p) SEQ ID NOs: 1552 and 1587, respectively;
[0888] q) SEQ ID NOs: 1553 and 1588, respectively;
[0889] r) SEQ ID NOs: 1554 and 1589, respectively;
[0890] s) SEQ ID NOs: 1555 and 1590, respectively;
[0891] t) SEQ ID NOs: 1556 and 1591, respectively;
[0892] u) SEQ ID NOs: 1557 and 1592, respectively;
[0893] v) SEQ ID NOs: 1558 and 1593, respectively;
[0894] w) SEQ ID NOs: 1559 and 1594, respectively;
[0895] x) SEQ ID NOs: 1560 and 1595, respectively;
[0896] y) SEQ ID NOs: 1561 and 1596, respectively;
[0897] z) SEQ ID NOs: 1562 and 1597, respectively;
[0898] aa) SEQ ID NOs: 1563 and 1598, respectively;
[0899] bb) SEQ ID NOs: 1564 and 1599, respectively;
[0900] cc) SEQ ID NOs: 1565 and 1600, respectively;
[0901] dd) SEQ ID NOs: 1566 and 1601, respectively;
[0902] ee) SEQ ID NOs: 1567 and 1602, respectively;
[0903] ff) SEQ ID NOs: 1568 and 1603, respectively;
[0904] gg) SEQ ID NOs: 1569 and 1604, respectively;
[0905] hh) SEQ ID NOs: 1570 and 1605, respectively;
[0906] ii) SEQ ID NOs: 1571 and 1606, respectively; and
[0907] jj) SEQ ID NOs: 1681 and 1586, respectively,
   wherein the oligonucleotide comprises at least one GalNAc moiety conjugated to a nucleotide.

[0908] In some embodiments, the sense and antisense strands of an oligonucleotide comprise nucleotides sequences selected from the group consisting of:
[0909] a) SEQ ID NOs: 1540 and 1575, respectively;
[0910] b) SEQ ID NOs: 1544 and 1579, respectively;
[0911] c) SEQ ID NOs: 1546 and 1581, respectively;
[0912] d) SEQ ID NOs: 1551 and 1586, respectively;
[0913] e) SEQ ID NOs: 1552 and 1587, respectively;
[0914] f) SEQ ID NOs: 1553 and 1588, respectively;
[0915] g) SEQ ID NOs: 1558 and 1594, respectively;
[0916] h) SEQ ID NOs: 1560 and 1595, respectively;
[0917] i) SEQ ID NOs: 1564 and 1599, respectively;
[0918] j) SEQ ID NOs: 1565 and 1600, respectively;
[0919] k) SEQ ID NOs: 1566 and 1601, respectively;
[0920] l) SEQ ID NOs: 1570 and 1605, respectively; and
[0921] m) SEQ ID NOs: 1681 and 1586, respectively,
   wherein the oligonucleotide comprises at least one GalNAc moiety conjugated to a nucleotide.

[0922] In some embodiments, the sense and antisense strands of an oligonucleotide comprise nucleotides sequences selected from the group consisting of:
[0923] a) SEQ ID NOs: 1553 and 1588, respectively;
[0924] b) SEQ ID NOs: 1560 and 1595, respectively;
[0925] c) SEQ ID NOs: 1564 and 1599, respectively;
[0926] d) SEQ ID NOs: 1551 and 1586, respectively;
[0927] e) SEQ ID NOs: 1570 and 1605, respectively; and
[0928] f) SEQ ID NOs: 1681 and 1586, respectively,
   wherein the oligonucleotide comprises at least one GalNAc moiety conjugated to a nucleotide.

### Lipid Conjugation

[0929] In some embodiments, one or more lipid moieties are conjugated to a 5′ terminal nucleotide of a sense strand. In some embodiments, one or more lipid moieties are conjugated to an adenine nucleotide. In some embodiments, one or more lipid moieties are conjugated to a guanine nucleotide. In some embodiments, one or more lipid moieties are conjugated to a cytosine nucleotide. In some embodiments, one or more lipid moieties are conjugated to a thymine (T) nucleotide. In some embodiments, one or more lipid moieties are conjugated to a uracil (U) nucleotide.

[0930] In some embodiments, the lipid moiety is a hydrocarbon chain. In some embodiments, the hydrocarbon chain is saturated. In other embodiments, the hydrocarbon chain is unsaturated. In some embodiments, the hydrocarbon chain is branched. In other embodiments, the hydrocarbon chain is straight. In some embodiments, the lipid moiety is a C₈-C₃₀ hydrocarbon chain. In certain embodiments, the lipid moiety is a C₈:0, C₁₀:0, C₁₁:0, C₁₂:0, C₁₄:0, C₁₆:0, C₁₇:0, C₁₈:0, C₁₈:1, C₁₈:2, C₂₂:5, C₂₂:0, C₂₄:0, C₂₆:0, C₂₂:6, C₂₄:1, diacyl C₁₆:0 or diacyl C₁₈:1. In some embodiments, the lipid moiety is a C₁₆ hydrocarbon chain. In some embodiments, the C₁₆ hydrocarbon chain is represented as:

[chemical structure]

[0931] In some embodiments, the sense strand is 20-22 nucleotides in length, and a lipid moiety is conjugated to the 5′ terminal nucleotide of the sense strand. In some embodiments, the sense strand is 20-22 nucleotides in length, and a hydrocarbon chain is conjugated to the 5′ terminal nucleotide of the sense strand. In some embodiments, the sense strand is 20-22 nucleotides in length, and a C₁₄-C₂₂ hydrocarbon chain is conjugated to the 5′ terminal nucleotide of the sense strand. In some embodiments, the sense strand is 20-22 nucleotides in length and a C₁₆ hydrocarbon chain is conjugated to the 5′ terminal nucleotide of the sense strand. In some embodiments, the sense strand is 20 nucleotides in length, and a lipid moiety is conjugated to the 5′ terminal nucleotide of the sense strand. In some embodiments, the sense strand is 20 nucleotides in length, and a hydrocarbon chain is conjugated to the 5′ terminal nucleotide of the sense strand. In some embodiments, the sense strand is 20 nucleotides in length, and a C₁₄-C₂₂ hydrocarbon chain is conjugated to the 5′ terminal nucleotide of the sense strand. In some embodiments, the sense strand is 20 nucleotides in length, and a C₁₆ hydrocarbon chain is conjugated to the 5′ terminal nucleotide of the sense strand.

[0932] In some embodiments, the oligonucleotide comprises (i) a sense strand of 20-22 nucleotides in length; (ii) an antisense strand comprising a 3′ overhang sequence of one or more nucleotides in length; (iii) a blunt end comprising the 3′ end of the sense strand; and (iv) a lipid moiety conjugated to the 5′ terminal nucleotide of the sense strand. In some embodiments, the oligonucleotide comprises (i) a sense strand of 20-22 nucleotides in length; (ii) an antisense strand comprising a 3′ overhang sequence of one or more nucleotides in length; (iii) a blunt end comprising the 3′ end of the sense strand; and (iv) a hydrocarbon chain conjugated to the 5′ terminal nucleotide of the sense strand. In some embodiments, the oligonucleotide comprises (i) a sense strand of 20-22 nucleotides in length; (ii) an antisense strand comprising a 3′ overhang sequence of one or more nucleotides in length; (iii) a blunt end comprising the 3′ end of the sense strand; and (iv) a C₁₄-C₂₂ hydrocarbon chain conjugated to the 5′ terminal nucleotide of the sense strand. In some embodiments, the oligonucleotide comprises (i) a sense strand of 20-22 nucleotides in length; (ii) an antisense strand comprising a 3′ overhang sequence of one or more nucleotides in length; (iii) a blunt end comprising the 3′ end of the sense strand; and (iv) a C₁₆ hydrocarbon chain conjugated to the 5′ terminal nucleotide of the sense strand.

[0933] In some embodiments, the oligonucleotide comprises (i) a sense strand of 20 nucleotides in length; (ii) an antisense strand of 22 nucleotides in length comprising a 3′ overhang sequence of two nucleotides in length; (iii) a blunt end comprising the 3′ end of the sense strand; and (iv) a lipid moiety conjugated to the 5′ terminal nucleotide of the sense strand. In some embodiments, the oligonucleotide comprises (i) a sense strand of 20 nucleotides in length; (ii) an antisense strand of 22 nucleotides in length comprising a 3′ overhang sequence of two nucleotides in length; (iii) a blunt end comprising the 3′ end of the sense strand; and (iv) a hydrocarbon chain conjugated to the 5′ terminal nucleotide of the sense strand. In some embodiments, the oligonucleotide comprises (i) a sense strand of 20 nucleotides in length; (ii) an antisense strand of 22 nucleotides in length comprising a 3′ overhang sequence of 2 nucleotides in length; (iii) a blunt end comprising the 3′ end of the sense strand; and (iv) a C₁₄-C₂₂ hydrocarbon chain conjugated to the 5′ terminal nucleotide of the sense strand. In some embodiments, the oligonucleotide comprises (i) a sense strand of 20 nucleotides in length; (ii) an antisense strand of 22 nucleotides in length comprising a 3′ overhang sequence of 2 nucleotides in length; (iii) a blunt end comprising the 3′ end of the sense strand; and (iv) a C₁₆ hydrocarbon chain conjugated to the 5′ terminal nucleotide of the sense strand.

[0934] In some embodiments, the oligonucleotide comprises (i) an antisense strand of 19-30 nucleotides comprising a region of complementarity to a SNCA mRNA target sequence selected from SEQ ID NOs: 1781, 1782, 1796, 1798, 1802, 1808, 1814, 1817, 1713, 1718, 1726, 1830, 1839, 1742, 1846, 1852, 1865, 1784, 1804, 1721, 1822, 1840, 1735, 1847, 1855, 1864, 1901, 1902, 1938, 1947, 1955, 1964, 1973, and 1978; (ii) a sense strand of 19-25 nucleotides that forms a duplex region with the antisense strand; and (iii) a lipid moiety conjugated to the 5′ terminal nucleotide of the sense strand. In some embodiments, the oligonucleotide comprises (i) an antisense strand of 19-30 nucleotides comprising a region of complementarity to a SNCA mRNA target sequence selected from SEQ ID NOs: 1798, 1817, 1718, 1846, 1852, 1865, 1804, 1721, 1847, 1855, 1864, and 1955; (ii) a sense strand of 19-25 nucleotides that forms a duplex region with the antisense strand; and (iii) a lipid moiety conjugated to the 5′ terminal nucleotide of the sense strand. In some embodiments, the oligonucleotide comprises (i) an antisense strand of 19-30 nucleotides comprising a region of complementarity to a SNCA mRNA target sequence selected from SEQ ID NOs: 1865, 1721, 1847, 1846, and 1955; (ii) a sense strand of 19-25 nucleotides that forms a duplex region with the antisense strand; and (iii) a lipid moiety conjugated to the 5′ terminal nucleotide of the sense strand.

[0935] In some embodiments, the oligonucleotide comprises (i) an antisense strand of 19-30 nucleotides comprising a region of complementarity to a SNCA mRNA target sequence selected from SEQ ID NOs: 1781, 1782, 1796, 1798, 1802, 1808, 1814, 1817, 1713, 1718, 1726, 1830, 1839, 1742, 1846, 1852, 1865, 1784, 1804, 1721, 1822, 1840, 1735, 1847, 1855, 1864, 1901, 1902, 1938, 1947, 1955, 1964, 1973, and 1978; (ii) a sense strand of 19-25 nucleotides that forms a duplex region with the antisense strand; and (iii) a hydrocarbon chain conjugated to the 5′ terminal nucleotide of the sense strand. In some embodiments, the oligonucleotide comprises (i) an antisense strand of 19-30 nucleotides comprising a region of complementarity to a SNCA mRNA target sequence selected from SEQ ID NOs: 1798, 1817, 1718, 1846, 1852, 1865, 1804, 1721, 1847, 1855, 1864, and 1955; (ii) a sense strand of 19-25 nucleotides that forms a duplex region with the antisense strand; and (iii) a hydrocarbon chain conjugated to the 5′ terminal nucleotide of the sense strand. In some embodiments, the oligonucleotide comprises (i) an antisense strand of 19-30 nucleotides comprising a region of complementarity to a SNCA mRNA target sequence selected from SEQ ID NOs: 1865, 1721, 1847, 1846, and 1955; (ii) a sense strand of 19-25 nucleotides that forms a duplex region with the antisense strand; and (iii) a hydrocarbon chain conjugated to the 5′ terminal nucleotide of the sense strand.

[0936] In some embodiments, the oligonucleotide comprises (i) an antisense strand of 19-30 nucleotides comprising a region of complementarity to a SNCA mRNA target sequence selected from SEQ ID NOs: 1781, 1782, 1796, 1798, 1802, 1808, 1814, 1817, 1713, 1718, 1726, 1830, 1839, 1742, 1846, 1852, 1865, 1784, 1804, 1721, 1822, 1840, 1735, 1847, 1855, 1864, 1901, 1902, 1938, 1947, 1955, 1964, 1973, and 1978; (ii) a sense strand of 19-25 nucleotides that forms a duplex region with the antisense strand; and (iii) a C₁₄-C₂₂ hydrocarbon chain conjugated to the 5′ terminal nucleotide of the sense strand. In some embodiments, the oligonucleotide comprises (i) an antisense strand of 19-30 nucleotides comprising a region of complementarity to a SNCA mRNA target sequence selected from SEQ ID NOs: 1798, 1817, 1718, 1846, 1852, 1865, 1804, 1721, 1847, 1855, 1864, and 1955; (ii) a sense strand of 19-25 nucleotides that forms a duplex region with the antisense strand; and (iii) a C₁₄-C₂₂ hydrocarbon chain conjugated to the 5′ terminal nucleotide of the sense strand. In some embodiments, the oligonucleotide comprises (i) an antisense strand of 19-30 nucleotides comprising a region of complementarity to a SNCA mRNA target sequence selected from SEQ ID NOs: 1865, 1721, 1847, 1846, and 1955; (ii) a sense strand of 19-25 nucleotides that forms a duplex region with the antisense strand; and (iii) a C₁₄-C₂₂ hydrocarbon chain conjugated to the 5′ terminal nucleotide of the sense strand.

[0937] In some embodiments, the oligonucleotide comprises (i) an antisense strand of 19-30 nucleotides comprising a region of complementarity to a SNCA mRNA target sequence selected from SEQ ID NOs:1781, 1782, 1796, 1798, 1802, 1808, 1814, 1817, 1713, 1718, 1726, 1830, 1839, 1742, 1846, 1852, 1865, 1784, 1804, 1721, 1822, 1840, 1735, 1847, 1855, 1864, 1901, 1902, 1938, 1947, 1955, 1964, 1973, and 1978; (ii) a sense strand of 19-25 nucleotides that forms a duplex region with the antisense strand; and (iii) a C₁₆ hydrocarbon chain conjugated to the 5′ terminal nucleotide of the sense strand. In some embodiments, the oligonucleotide comprises (i) an antisense strand of 19-30 nucleotides comprising a region of complementarity to a SNCA mRNA target sequence selected from SEQ ID NOs: 1798, 1817, 1718, 1846, 1852, 1865, 1804, 1721, 1847, 1855, 1864, and 1955; (ii) a sense strand of 19-25 nucleotides that forms a duplex region with the antisense strand; and (iii) a C₁₆ hydrocarbon chain conjugated to the 5′ terminal nucleotide of the sense strand. In some embodiments, the oligonucleotide comprises (i) an antisense strand of 19-30 nucleotides comprising a region of complementarity to a SNCA mRNA target sequence selected from SEQ ID NOs: 1865, 1721, 1847, 1846, and 1955; (ii) a sense strand of 19-25 nucleotides that forms a duplex region with the antisense strand; and (iii) a C₁₆ hydrocarbon chain conjugated to the 5′ terminal nucleotide of the sense strand.

[0938] In some embodiments, the oligonucleotide comprises a sense strand comprising the nucleotide sequence of SEQ ID NO: 1681 and an antisense strand comprising the nucleotide sequence of SEQ ID NO: 1586, wherein the sense strand comprises a lipid moiety conjugated to the 5′ terminal nucleotide of the sense strand. In some embodiments, the oligonucleotide comprises a sense strand comprising the nucleotide sequence of SEQ ID NO: 1681 and an antisense strand comprising the nucleotide sequence of SEQ ID NO: 1586, wherein the sense strand comprises a hydrocarbon chain conjugated to the 5′ terminal nucleotide of the sense strand. In some embodiments, the oligonucleotide comprises a sense strand comprising the nucleotide sequence of SEQ ID NO: 1681 and an antisense strand comprising the nucleotide sequence of SEQ ID NO: 1586, wherein the sense strand comprises a C₁₄-C₂₂ hydrocarbon chain conjugated to the 5′ terminal nucleotide of the sense strand. In some embodiments, the oligonucleotide comprises a sense strand comprising the nucleotide sequence of SEQ ID NO: 1681 and an antisense strand comprising the nucleotide sequence of SEQ ID NO: 1586, wherein the sense strand comprises a C₁₆ hydrocarbon chain conjugated to the 5′ terminal nucleotide of the sense strand.

### Exemplary SNCA-Targeting RNAi Oligonucleotides

[0939] In some embodiments, the SNCA-targeting RNAi oligonucleotide for reducing SNCA gene expression comprise a sense strand and an antisense strand, wherein all nucleotides comprising the sense strand and the antisense strand are modified, wherein the antisense strand comprises a region of complementarity to a SNCA mRNA target sequence of any one of SEQ ID NOs: 1683-2066, and wherein the region of complementarity is at least 15 contiguous nucleotides in length. In some embodiments, the 5′ terminal nucleotide of the antisense strand comprises 4′-O-monomethylphosphonate-2′-O-methyluridine [MePhosphonate-4O-mU], as described herein. In some embodiments, the 5′ terminal nucleotide of the antisense strand comprises a phosphorothioate linkage. In some embodiments, the antisense strand and the sense strand comprise one or more 2′-F and 2′-OMe modified nucleotides and at least one phosphorothioate linkage. In some embodiments, the antisense strand comprises 4 phosphorothioate linkages and the sense strand comprises 1 phosphorothioate linkage. In some embodiments, the antisense strand comprises 5 phosphorothioate linkages and the sense strand comprises 1 phosphorothioate linkage.

[0940] In some embodiments, the oligonucleotide comprises a sense strand having a sequence of any one of SEQ ID NOs: 1683-2066 and an antisense strand comprising a complementary sequence selected from any one of SEQ ID NOs: 2067-2450.

[0941] In some embodiments, the oligonucleotide comprises a sense strand having a sequence of any one of SEQ ID NOs: 1-384 and an antisense strand comprising a complementary sequence selected from any one of SEQ ID NOs: 385-768.

[0942] In some embodiments, the oligonucleotide comprises a sense strand having a sequence of any one of SEQ ID NOs: 1537-1571 and an antisense strand comprising a complementary sequence selected from any one of SEQ ID NOs: 1572-1606.

[0943] In some embodiments, the oligonucleotide comprises a sense strand having a sequence of any one of SEQ ID NOs: 1537-1571 and 1681 and an antisense strand comprising a complementary sequence selected from any one of SEQ ID NOs: 1572-1606.

[0944] In some embodiments, the oligonucleotide consists a sense strand having a sequence of any one of SEQ ID NOs: 1537-1571 and an antisense strand comprising a complementary sequence selected from any one of SEQ ID NOs: 1572-1606.

[0945] In some embodiments, the oligonucleotide consists a sense strand having a sequence of any one of SEQ ID NOs: 1537-1571 and 1681 and an antisense strand comprising a complementary sequence selected from any one of SEQ ID NOs: 1572-1606.

[0946] In some embodiments, the oligonucleotide is for reducing SNCA gene expression and comprises:
[0947] a sense strand of 36 nucleotides comprising a 2′-F modified nucleotide at positions 3, 5, 8, 10, 12, 13, 15, and 17; a 2′-OMe modified nucleotide at positions 1, 2, 4, 6, 7, 9, 11, 14, 16, 18-27, and 31-36; a GalNAc-conjugated nucleotide at position 28, 29, and 30; and a phosphorothioate linkage between positions 1 and 2; and
[0948] an antisense strand of 22 nucleotides comprising a 2′-F modified nucleotide at positions 2, 3, 4, 5, 7, 10, 14, 16, and 19; a 2′-OMe at positions 1, 6, 8, 9, 11, 12, 13, 15, 17, 18, and 20-22; a phosphorothioate linkage between positions 1 and 2, positions 2 and 3, positions 20 and 21, and positions 21 and 22; and a 5′ terminal nucleotide at position 1 comprising a 4′-phosphate analog, optionally wherein the 5′ terminal nucleotide comprises 4′-O-monomethylphosphonate-2′-O-methyluridine [MePhosphonate-4O-mU]; wherein positions 1-20 of the antisense strand form a duplex region with positions 1-20 of the sense strand, wherein positions 21-36 of the sense strand form a stem-loop, wherein positions 27-30 form the loop of the stem-loop, optionally wherein positions 27-30 comprise a tetraL, wherein positions 21 and 22 of the antisense strand comprise an overhang, and wherein the sense strand and antisense strands comprise nucleotide sequences selected from the group consisting of:
[0949] a) SEQ ID NOs: 1537 and 1572, respectively;
[0950] b) SEQ ID NOs: 1538 and 1573, respectively;
[0951] c) SEQ ID NOs: 1539 and 1574, respectively;
[0952] d) SEQ ID NOs: 1540 and 1575, respectively;
[0953] e) SEQ ID NOs: 1541 and 1576, respectively;
[0954] f) SEQ ID NOs: 1542 and 1577, respectively;
[0955] g) SEQ ID NOs: 1543 and 1578, respectively;
[0956] h) SEQ ID NOs: 1544 and 1579, respectively;
[0957] i) SEQ ID NOs: 1545 and 1580, respectively;
[0958] j) SEQ ID NOs: 1546 and 1581, respectively;
[0959] k) SEQ ID NOs: 1547 and 1582, respectively;
[0960] l) SEQ ID NOs: 1548 and 1583, respectively;
[0961] m) SEQ ID NOs: 1549 and 1584, respectively;
[0962] n) SEQ ID NOs: 1550 and 1585, respectively;
[0963] o) SEQ ID NOs: 1551 and 1586, respectively;
[0964] p) SEQ ID NOs: 1552 and 1587, respectively;
[0965] q) SEQ ID NOs: 1553 and 1588, respectively;
[0966] r) SEQ ID NOs: 1554 and 1589, respectively;
[0967] s) SEQ ID NOs: 1555 and 1590, respectively;
[0968] t) SEQ ID NOs: 1556 and 1591, respectively;
[0969] u) SEQ ID NOs: 1557 and 1592, respectively;
[0970] v) SEQ ID NOs: 1558 and 1593, respectively;
[0971] w) SEQ ID NOs: 1559 and 1594, respectively;
[0972] x) SEQ ID NOs: 1560 and 1595, respectively;
[0973] y) SEQ ID NOs: 1561 and 1596, respectively;
[0974] z) SEQ ID NOs: 1562 and 1597, respectively;
[0975] aa) SEQ ID NOs: 1563 and 1598, respectively;
[0976] bb) SEQ ID NOs: 1564 and 1599, respectively;
[0977] cc) SEQ ID NOs: 1565 and 1600, respectively;
[0978] dd) SEQ ID NOs: 1566 and 1601, respectively;
[0979] ee) SEQ ID NOs: 1567 and 1602, respectively;
[0980] ff) SEQ ID NOs: 1568 and 1603, respectively;
[0981] gg) SEQ ID NOs: 1569 and 1604, respectively;
[0982] hh) SEQ ID NOs: 1570 and 1605, respectively; and
[0983] ii) SEQ ID NOs: 1571 and 1606, respectively.

[0984] In some embodiments, the oligonucleotide is for reducing SNCA gene expression and comprises:
[0985] a sense strand of 36 nucleotides comprising a 2′-F modified nucleotide at positions 3, 5, 8, 10, 12, 13, 15, and 17; a 2′-OMe modified nucleotide at positions 1, 2, 4, 6, 7, 9, 11, 14, 16, 18-27, and 31-36; a GalNAc-conjugated nucleotide at position 28, 29, and 30; and a phosphorothioate linkage between positions 1 and 2; and
[0986] an antisense strand of 22 nucleotides comprising a 2′-F modified nucleotide at positions 2, 3, 4, 5, 7, 10, 14, 16, and 19; a 2′-OMe at positions 1, 6, 8, 9, 11, 12, 13, 15, 17, 18, and 20-22; a phosphorothioate linkage between positions 1 and 2, positions 2 and 3, positions 20 and 21, and positions 21 and 22; and a 5′ terminal nucleotide at position 1 comprising a 4′-phosphate analog, optionally wherein the 5′ terminal nucleotide comprises 4′-O-monomethylphosphonate-2′-O-methyluridine [MePhosphonate-4O-mU]; wherein positions 1-20 of the antisense strand form a duplex region with positions 1-20 of the sense strand, wherein positions 21-36 of the sense strand form a stem-loop, wherein positions 27-30 form the loop of the stem-loop, optionally wherein positions 27-30 comprise a tetraL, wherein positions 21 and 22 of the antisense strand comprise an overhang, and wherein the sense strand and antisense strands comprise nucleotide sequences selected from the group consisting of:
[0987] a) SEQ ID NOs: 1540 and 1575, respectively;
[0988] b) SEQ ID NOs: 1544 and 1579, respectively;
[0989] c) SEQ ID NOs: 1546 and 1581, respectively;
[0990] d) SEQ ID NOs: 1551 and 1586, respectively;
[0991] e) SEQ ID NOs: 1552 and 1587, respectively;
[0992] f) SEQ ID NOs: 1553 and 1588, respectively;
[0993] g) SEQ ID NOs: 1558 and 1594, respectively;
[0994] h) SEQ ID NOs: 1560 and 1595, respectively;
[0995] i) SEQ ID NOs: 1564 and 1599, respectively;
[0996] j) SEQ ID NOs: 1565 and 1600, respectively;
[0997] k) SEQ ID NOs: 1566 and 1601, respectively; and
[0998] l) SEQ ID NOs: 1570 and 1605, respectively.

[0999] In some embodiments, the oligonucleotide is for reducing SNCA gene expression and comprises:
[1000] a sense strand of 36 nucleotides comprising a 2′-F modified nucleotide at positions 3, 5, 8, 10, 12, 13, 15, and 17; a 2′-OMe modified nucleotide at positions 1, 2, 4, 6, 7, 9, 11, 14, 16, 18-27, and 31-36; a GalNAc-conjugated nucleotide at position 28, 29 and 30; and a phosphorothioate linkage between positions 1 and 2; and
[1001] an antisense strand of 22 nucleotides comprising a 2′-F modified nucleotide at positions 2, 3, 4, 5, 7, 10, 14, 16, and 19; a 2′-OMe at positions 1, 6, 8, 9, 11, 12, 13, 15, 17, 18, and 20-22; a phosphorothioate linkage between positions 1 and 2, positions 2 and 3, positions 20 and 21, and positions 21 and 22; and a 5′ terminal nucleotide at position 1 comprising a 4′-phosphate analog, optionally wherein the 5′-terminal nucleotide comprises 4′-O-monomethylphosphonate-2′-O-methyluridine [MePhosphonate-4O-mU]; wherein positions 1-20 of the antisense strand form a duplex region with positions 1-20 of the sense strand, wherein positions 21-36 of the sense strand form a stem-loop, wherein positions 27-30 form the loop of the stem-loop, optionally wherein positions 27-30 comprise a tetraL, wherein positions 21 and 22 of the antisense strand comprise an overhang, and wherein the sense strand and antisense strands comprise nucleotide sequences selected from the group consisting of:
[1002] a) SEQ ID NOs: 1553 and 1588, respectively;
[1003] b) SEQ ID NOs: 1560 and 1595, respectively;
[1004] c) SEQ ID NOs: 1564 and 1599, respectively;
[1005] d) SEQ ID NOs: 1551 and 1586, respectively; and
[1006] e) SEQ ID NOs: 1570 and 1605, respectively.

[1007] In some embodiments, the oligonucleotide is for reducing SNCA gene expression and comprises:
[1008] a sense strand of 20 nucleotides comprising a 2′-F modified nucleotide at positions 3, 5, 8, 10, 12, 13, 15, and 17; a 2′-OMe modified nucleotide at positions 2, 4, 6, 7, 9, 11, 14, 16, and 18-20; a C₁₆ hydrocarbon chain conjugated to a nucleotide at position 1; and a phosphorothioate linkage between positions 1 and 2, between positions 18 and 19, and between positions 19 and 20; and
[1009] an antisense strand of 22 nucleotides comprising a 2′-F modified nucleotide at positions 2, 3, 4, 5, 7, 10, 14, 16, and 19; a 2′-OMe at positions 1, 6, 8, 9, 11, 12, 13, 15, 17, 18, and 20-22; a phosphorothioate linkage between positions 1 and 2, positions 2 and 3, positions 20 and 21, and positions 21 and 22; and a 5′ terminal nucleotide at position 1 comprising a 4′-phosphate analog, optionally wherein the 5′ terminal nucleotide comprises 4′-O-monomethylphosphonate-2′-O-methyluridine [MePhosphonate-4O-mU]; wherein positions 1-20 of the antisense strand form a duplex region with positions 1-20 of the sense strand, wherein positions 21 and 22 of the antisense strand comprise an overhang, and wherein the sense strand and antisense strands comprise nucleotide sequences of SEQ ID NOs: 1681 and 1586, respectively.

[1010] In some embodiments, the oligonucleotide is for reducing SNCA gene expression and comprises a sense strand comprising the nucleotide sequence as set forth in SEQ ID NO: 1553 and an antisense strand comprising the nucleotide sequence as set forth in SEQ ID NO: 1588. In some embodiments, the oligonucleotide is for reducing SNCA gene expression and comprises a sense strand comprising the nucleotide sequence as set forth in SEQ ID NO: 1560 and an antisense strand comprising the nucleotide sequence as set forth in SEQ ID NO: 1595. In some embodiments, the oligonucleotide is for reducing SNCA gene expression and comprises a sense strand comprising the nucleotide sequence as set forth in SEQ ID NO: 1564 and an antisense strand comprising the nucleotide sequence as set forth in SEQ ID NO: 1599. In some embodiments, the oligonucleotide is for reducing SNCA gene expression comprises a sense strand comprising the nucleotide sequence as set forth in SEQ ID NO: 1551 and an antisense strand comprising the nucleotide sequence as set forth in SEQ ID NO: 1586. In some embodiments, the oligonucleotide is for reducing SNCA gene expression and comprises a sense strand comprising the nucleotide sequence as set forth in SEQ ID NO: 1570 and an antisense strand comprising the nucleotide sequence as set forth in SEQ ID NO: 1605. In some embodiments, the oligonucleotide is for reducing SNCA gene expression and comprises a sense strand comprising the nucleotide sequence as set forth in SEQ ID NO: 1681 and an antisense strand comprising the nucleotide sequence as set forth in SEQ ID NO: 1586.

[1011] In some embodiments, the oligonucleotide is for reducing SNCA gene expression and comprises (i) an antisense strand of 19-30 nucleotides in length, wherein the antisense strand comprises a nucleotide sequence comprising a region of complementarity to a SNCA mRNA target sequence, wherein the region of complementarity is set forth in SEQ ID NO: 1865; and (ii) a sense strand of 19-50 nucleotides in length comprising a region of complementarity to the antisense strand, wherein the antisense and sense strands are separate strands that form an asymmetric duplex region having an overhang of 1-4 nucleotides at the 3′ terminus of the antisense strand.

[1012] In some embodiments, the oligonucleotide is for reducing SNCA gene expression and comprises (i) an antisense strand of 19-30 nucleotides in length, wherein the antisense strand comprises a nucleotide sequence comprising a region of complementarity to a SNCA mRNA target sequence, wherein the region of complementarity is set forth in SEQ ID NO: 1721; and (ii) a sense strand of 19-50 nucleotides in length comprising a region of complementarity to the antisense strand, wherein the antisense and sense strands are separate strands that form an asymmetric duplex region having an overhang of 1-4 nucleotides at the 3′ terminus of the antisense strand.

[1013] In some embodiments, the oligonucleotide is for reducing SNCA expression and comprises (i) an antisense strand of 19-30 nucleotides in length, wherein the antisense strand comprises a nucleotide sequence comprising a region of complementarity to a SNCA mRNA target sequence, wherein the region of complementarity is set forth in SEQ ID NO: 1847; and (ii) a sense strand of 19-50 nucleotides in length comprising a region of complementarity to the antisense strand, wherein the anti sense and sense strands are separate strands that form an asymmetric duplex region having an overhang of 1-4 nucleotides at the 3′ terminus of the antisense strand.

[1014] In some embodiments, the oligonucleotide is for reducing SNCA gene expression and comprises (i) an antisense strand of 19-30 nucleotides in length, wherein the antisense strand comprises a nucleotide sequence comprising a region of complementarity to a SNCA mRNA target sequence, wherein the region of complementarity is set forth in SEQ ID NO: 1846; and (ii) a sense strand of 19-50 nucleotides in length comprising a region of complementarity to the antisense strand, wherein the anti sense and sense strands are separate strands that form an asymmetric duplex region having an overhang of 1-4 nucleotides at the 3′ terminus of the antisense strand.

[1015] In some embodiments, the oligonucleotide is for reducing SNCA gene expression and comprises (i) an antisense strand of 19-30 nucleotides in length, wherein the antisense strand comprises a nucleotide sequence comprising a region of complementarity to a SNCA mRNA target sequence, wherein the region of complementarity is set forth in SEQ ID NO: 1955; and (ii) a sense strand of 19-50 nucleotides in length comprising a region of complementarity to the antisense strand, wherein the anti sense and sense strands are separate strands that form an asymmetric duplex region having an overhang of 1-4 nucleotides at the 3′ terminus of the antisense strand.

[1016] In some embodiments, the oligonucleotide is for reducing SNCA gene expression and comprises (i) an antisense strand of 19-30 nucleotides in length, wherein the antisense strand comprises a nucleotide sequence comprising a region of complementarity to a SNCA mRNA target sequence, wherein the region of complementarity is set forth in SEQ ID NO: 1865; and (ii) a sense strand of 19-50 nucleotides in length comprising a region of complementarity to the antisense strand and a stem-loop at the 3′ terminus, wherein the stem-loop is set forth as S1-L-S2, wherein S1 is complementary to S2, and wherein L forms a loop between S1 and S2 of 3 to 5 nucleotides in length, wherein the antisense and sense strands are separate strands that form an asymmetric duplex region having an overhang of 1-4 nucleotides at the 3′ terminus of the antisense strand.

[1017] In some embodiments, the oligonucleotide is for reducing SNCA gene expression and comprises (i) an antisense strand of 19-30 nucleotides in length, wherein the antisense strand comprises a nucleotide sequence comprising a region of complementarity to a SNCA mRNA target sequence, wherein the region of complementarity is set forth in SEQ ID NO: 1721; and (ii) a sense strand of 19-50 nucleotides in length comprising a region of complementarity to the antisense strand and a stem-loop at the 3′ terminus, wherein the stem-loop is set forth as S1-L-S2, wherein S1 is complementary to S2, and wherein L forms a loop between S1 and S2 of 3 to 5 nucleotides in length, wherein the antisense and sense strands are separate strands that form an asymmetric duplex region having an overhang of 1-4 nucleotides at the 3′ terminus of the antisense strand.

[1018] In some embodiments, the oligonucleotide is for reducing SNCA gene expression and comprises (i) an antisense strand of 19-30 nucleotides in length, wherein the antisense strand comprises a nucleotide sequence comprising a region of complementarity to a SNCA mRNA target sequence, wherein the region of complementarity is set forth in SEQ ID NO: 1847; and (ii) a sense strand of 19-50 nucleotides in length comprising a region of complementarity to the antisense strand and a stem-loop at the 3′ terminus, wherein the stem-loop is set forth as S1-L-S2, wherein S1 is complementary to S2, and wherein L forms a loop between S1 and S2 of 3 to 5 nucleotides in length, wherein the antisense and sense strands are separate strands that form an asymmetric duplex region having an overhang of 1-4 nucleotides at the 3′ terminus of the antisense strand.

[1019] In some embodiments, the oligonucleotide is for reducing SNCA gene expression and comprises (i) an antisense strand of 19-30 nucleotides in length, wherein the antisense strand comprises a nucleotide sequence comprising a region of complementarity to a SNCA mRNA target sequence, wherein the region of complementarity is set forth in SEQ ID NO: 1846; and (ii) a sense strand of 19-50 nucleotides in length comprising a region of complementarity to the antisense strand and a stem-loop at the 3′ terminus, wherein the stem-loop is set forth as S1-L-S2, wherein S1 is complementary to S2, and wherein L forms a loop between S1 and S2 of 3 to 5 nucleotides in length, wherein the antisense and sense strands are separate strands that form an asymmetric duplex region having an overhang of 1-4 nucleotides at the 3′ terminus of the antisense strand.

[1020] In some embodiments, the oligonucleotide is for reducing SNCA gene expression and comprises (i) an antisense strand of 19-30 nucleotides in length, wherein the antisense strand comprises a nucleotide sequence comprising a region of complementarity to a SNCA mRNA target sequence, wherein the region of complementarity is set forth in SEQ ID NO: 1955; and (ii) a sense strand of 19-50 nucleotides in length comprising a region of complementarity to the antisense strand and a stem-loop at the 3′ terminus, wherein the stem-loop is set forth as S1-L-S2, wherein S1 is complementary to S2, and wherein L forms a loop between S1 and S2 of 3 to 5 nucleotides in length, wherein the antisense and sense strands are separate strands that form an asymmetric duplex region having an overhang of 1-4 nucleotides at the 3′ terminus of the antisense strand.

[1021] In some embodiments, the oligonucleotide is for reducing SNCA gene expression and comprises (i) an antisense strand of 19-30 nucleotides in length, wherein the antisense strand comprises a nucleotide sequence comprising a region of complementarity to a SNCA mRNA target sequence, wherein the region of complementarity is set forth in SEQ ID NO: 1846; and (ii) a sense strand of 19-25 nucleotides in length comprising a region of complementarity to the antisense strand, wherein the oligonucleotide comprises a blunt end comprising the 3′ end of the sense strand, and wherein the antisense and sense strands are separate strands that form an asymmetric duplex region having an overhang of 1-4 nucleotides at the 3′ terminus of the antisense strand.

[1022] In some embodiments, the oligonucleotide is for reducing SNCA gene expression and comprises (i) an antisense strand of 19-30 nucleotides in length, wherein the antisense strand comprises a nucleotide sequence comprising a region of complementarity to a SNCA mRNA target sequence, wherein the region of complementarity is set forth in SEQ ID NO: 1865; and (ii) a sense strand of 19-50 nucleotides in length comprising a region of complementarity to the antisense strand, wherein the region of complementarity to the antisense strand is set forth in SEQ ID NO: 2249, and wherein the antisense and sense strands are separate strands that form an asymmetric duplex region having an overhang of 1-4 nucleotides at the 3′ terminus of the antisense strand.

[1023] In some embodiments, the oligonucleotide is for reducing SNCA gene expression and comprises (i) an antisense strand of 19-30 nucleotides in length, wherein the antisense strand comprises a nucleotide sequence comprising a region of complementarity to a SNCA mRNA target sequence, wherein the region of complementarity is set forth in SEQ ID NO: 1721; and (ii) a sense strand of 19-50 nucleotides in length comprising a region of complementarity to the antisense strand, wherein the region of complementarity to the antisense strand is set forth in SEQ ID NO: 2105, and wherein the antisense and sense strands are separate strands that form an asymmetric duplex region having an overhang of 1-4 nucleotides at the 3′ terminus of the antisense strand.

[1024] In some embodiments, the oligonucleotide is for reducing SNCA gene expression and comprises (i) an antisense strand of 19-30 nucleotides in length, wherein the antisense strand comprises a nucleotide sequence comprising a region of complementarity to a SNCA mRNA target sequence, wherein the region of complementarity is set forth in SEQ ID NO: 1847; and (ii) a sense strand of 19-50 nucleotides in length comprising a region of complementarity to the antisense strand, wherein the region of complementarity to the antisense strand is set forth in SEQ ID NO: 2231, and wherein the antisense and sense strands are separate strands that form an asymmetric duplex region having an overhang of 1-4 nucleotides at the 3′ terminus of the antisense strand.

[1025] In some embodiments, the oligonucleotide is for reducing SNCA gene expression and comprises (i) an antisense strand of 19-30 nucleotides in length, wherein the antisense strand comprises a nucleotide sequence comprising a region of complementarity to a SNCA mRNA target sequence, wherein the region of complementarity is set forth in SEQ ID NO: 1846; and (ii) a sense strand of 19-50 nucleotides in length comprising a region of complementarity to the antisense strand, wherein the region of complementarity to the antisense strand is set forth in SEQ ID NO: 2230, and wherein the antisense and sense strands are separate strands that form an asymmetric duplex region having an overhang of 1-4 nucleotides at the 3′ terminus of the antisense strand.

[1026] In some embodiments, the oligonucleotide is for reducing SNCA gene expression and comprises (i) an antisense strand of 19-30 nucleotides in length, wherein the antisense strand comprises a nucleotide sequence comprising a region of complementarity to a SNCA mRNA target sequence, wherein the region of complementarity is set forth in SEQ ID NO: 1955; and (ii) a sense strand of 19-50 nucleotides in length comprising a region of complementarity to the antisense strand, wherein the region of complementarity to the antisense strand is set forth in SEQ ID NO: 2339, and wherein the antisense and sense strands are separate strands that form an asymmetric duplex region having an overhang of 1-4 nucleotides at the 3′ terminus of the antisense strand.

[1027] In some embodiments, the oligonucleotide is for reducing SNCA gene expression and comprises (i) an antisense strand of 19-30 nucleotides in length, wherein the antisense strand comprises a nucleotide sequence comprising a region of complementarity to a SNCA mRNA target sequence, wherein the region of complementarity is set forth in SEQ ID NO: 1865; and (ii) a sense strand of 19-50 nucleotides in length comprising a region of complementarity to the antisense strand and a stem-loop at the 3′ terminus, wherein the region of complementarity to the antisense strand is set forth in SEQ ID NO: 2249, wherein the stem-loop is set forth as S1-L-S2, wherein S1 is complementary to S2, and wherein L forms a loop between S1 and S2 of 3 to 5 nucleotides in length, wherein the antisense and sense strands are separate strands that form an asymmetric duplex region having an overhang of 1-4 nucleotides at the 3′ terminus of the antisense strand.

[1028] In some embodiments, the oligonucleotide is for reducing SNCA gene expression and comprises (i) an antisense strand of 19-30 nucleotides in length, wherein the antisense strand comprises a nucleotide sequence comprising a region of complementarity to a SNCA mRNA target sequence, wherein the region of complementarity is set forth in SEQ ID NO: 1721; and (ii) a sense strand of 19-50 nucleotides in length comprising a region of complementarity to the antisense strand and a stem-loop at the 3′ terminus, wherein the region of complementarity to the antisense strand is set forth in SEQ ID NO: 2105, wherein the stem-loop is set forth as S1-L-S2, wherein S1 is complementary to S2, and wherein L forms a loop between S1 and S2 of 3 to 5 nucleotides in length, wherein the antisense and sense strands are separate strands that form an asymmetric duplex region having an overhang of 1-4 nucleotides at the 3′ terminus of the antisense strand.

[1029] In some embodiments, the oligonucleotide is for reducing SNCA gene expression and comprises (i) an antisense strand of 19-30 nucleotides in length, wherein the antisense strand comprises a nucleotide sequence comprising a region of complementarity to a SNCA mRNA target sequence, wherein the region of complementarity is set forth in SEQ ID NO: 1847; and (ii) a sense strand of 19-50 nucleotides in length comprising a region of complementarity to the antisense strand and a stem-loop at the 3′ terminus, wherein the region of complementarity to the antisense strand is set forth in SEQ ID NO: 2231, wherein the stem-loop is set forth as S1-L-S2, wherein S1 is complementary to S2, and wherein L forms a loop between S1 and S2 of 3 to 5 nucleotides in length, wherein the antisense and sense strands are separate strands that form an asymmetric duplex region having an overhang of 1-4 nucleotides at the 3′ terminus of the antisense strand.

[1030] In some embodiments, the oligonucleotide is for reducing SNCA gene expression and comprises (i) an antisense strand of 19-30 nucleotides in length, wherein the antisense strand comprises a nucleotide sequence comprising a region of complementarity to a SNCA mRNA target sequence, wherein the region of complementarity is set forth in SEQ ID NO: 1846; and (ii) a sense strand of 19-50 nucleotides in length comprising a region of complementarity to the antisense strand and a stem-loop at the 3′ terminus, wherein the region of complementarity to the antisense strand is set forth in SEQ ID NO: 2230, wherein the stem-loop is set forth as S1-L-S2, wherein S1 is complementary to S2, and wherein L forms a loop between S1 and S2 of 3 to 5 nucleotides in length, wherein the antisense and sense strands are separate strands that form an asymmetric duplex region having an overhang of 1-4 nucleotides at the 3′ terminus of the antisense strand.

[1031] In some embodiments, the oligonucleotide is for reducing SNCA gene expression and comprises (i) an antisense strand of 19-30 nucleotides in length, wherein the antisense strand comprises a nucleotide sequence comprising a region of complementarity to a SNCA mRNA target sequence, wherein the region of complementarity is set forth in SEQ ID NO: 1955; and (ii) a sense strand of 19-50 nucleotides in length comprising a region of complementarity to the antisense strand and a stem-loop at the 3′ terminus, wherein the region of complementarity to the antisense strand is set forth in SEQ ID NO: 2339, wherein the stem-loop is set forth as S1-L-S2, wherein S1 is complementary to S2, and wherein L forms a loop between S1 and S2 of 3 to 5 nucleotides in length, wherein the antisense and sense strands are separate strands that form an asymmetric duplex region having an overhang of 1-4 nucleotides at the 3′ terminus of the antisense strand.

[1032] In some embodiments, the oligonucleotide is for reducing SNCA gene expression and comprises (i) an antisense strand of 19-30 nucleotides in length, wherein the antisense strand comprises a nucleotide sequence comprising a region of complementarity to a SNCA mRNA target sequence, wherein the region of complementarity is set forth in SEQ ID NO: 1846; and (ii) a sense strand of 19-25 nucleotides in length comprising a region of complementarity to the antisense strand, wherein the region of complementarity to the antisense strand is set forth in SEQ ID NO: 2230, wherein the oligonucleotide comprises a blunt end comprising the 3′ end of the sense strand, and wherein the antisense and sense strands are separate strands that form an asymmetric duplex region having an overhang of 1-4 nucleotides at the 3′ terminus of the antisense strand.

[1033] In some embodiments, the oligonucleotide is for reducing SNCA gene expression and comprises a sense strand and an antisense strand according to:
[1034] Sense Strand: 5′-mX-S-mX-fX-mX-fX-mX-mX-fX-mX-fX-mX-fX-fX-mX-fX-mX-fX-mX-mX-mX-mX-mX-mX-mX-mX-mX-mX-[ademX-GalNAc][ademX-GalNAc][ademX-GalNAc]-mX-mX-mX-mX-mX-mX-3′; a13395 hybridized to:
[1035] Antisense Strand: 5-[MePhosphonate-4O-mX]-S-fX-S-fX-fX-fX-mX-fX-mX-mX-fX-mX-mX-mX-fX-mX-fX-mX-mX-fX-mX-S-mX-S-mX-3′;
[1036] wherein mX=2′-OMe modified nucleotide, fX=2′-F modified nucleotide, —S-=phosphorothioate linkage, -=phosphodiester linkage, [MePhosphonate-4O-mX]=4′-O-monomethylphosphonate-2′-O-methyl modified nucleotide, and ademX-GalNAc=GalNAc attached to a nucleotide.

[1037] In some embodiments, the oligonucleotide is for reducing SNCA gene expression and comprises a sense strand and an antisense strand according to:
[1038] Sense Strand: 5′-[AdemX-L]-S-mX-fX-mX-fX-mX-mX-fX-mX-fX-mX-fX-fX-mX-fX-mX-fX-mX-S-mX-S-mX-3′; hybridized to:
[1039] Antisense Strand: 5′-[MePhosphonate-4O-mX]-S-fX-S-fX-fX-fX-mX-fX-mX-mX-fX-mX-mX-mX-fX-mX-fX-mX-mX-fX-mX-S-mX-S-mX-3′;
[1040] wherein mX=2′-OMe modified nucleotide, fX=2′-F modified nucleotide, —S-=phosphorothioate linkage, -=phosphodiester linkage, [MePhosphonate-4O-mX]=4′-O-monomethylphosphonate-2′-O-methyl modified nucleotide, and ademX-L=lipid moiety attached to a nucleotide.

[1041] In some embodiments, the oligonucleotide is for reducing SNCA gene expression and comprises a sense strand and an antisense strand according to:
[1042] Sense Strand: 5′-[AdemX-C₁₆]-S-mX-fX-mX-fX-mX-mX-fX-mX-fX-mX-fX-fX-mX-fX-mX-fX-mX-S-mX-S-mX-3′; hybridized to:
[1043] Antisense Strand: 5′-[MePhosphonate-4O-mX]-S-fX-S-fX-fX-fX-mX-fX-mX-mX-fX-mX-mX-mX-fX-mX-fX-mX-mX-fX-mX-S-mX-S-mX-3′;
[1044] wherein mX=2′-OMe modified nucleotide, fX=2′-F modified nucleotide, —S-=phosphorothioate linkage, -=phosphodiester linkage, [MePhosphonate-4O-mX]=4′-O-monomethylphosphonate-2′-O-methyl modified nucleotide, and ademX-C₁₆=C₁₆ hydrocarbon chain attached to a nucleotide.

[1045] In some embodiments, the oligonucleotide is for reducing SNCA gene expression and comprises a sense strand and an antisense strand comprising nucleotide sequences selected from the group consisting of:
[1046] a) SEQ ID NOs: 1607 and 1642, respectively;
[1047] b) SEQ ID NOs: 1608 and 1643, respectively;
[1048] c) SEQ ID NOs: 1609 and 1644, respectively;
[1049] d) SEQ ID NOs: 1610 and 1645, respectively;
[1050] e) SEQ ID NOs: 1611 and 1646, respectively;
[1051] f) SEQ ID NOs: 1612 and 1647, respectively;
[1052] g) SEQ ID NOs: 1613 and 1648, respectively;
[1053] h) SEQ ID NOs: 1614 and 1649, respectively;
[1054] i) SEQ ID NOs: 1615 and 1650, respectively;
[1055] j) SEQ ID NOs: 1616 and 1651, respectively;
[1056] k) SEQ ID NOs: 1617 and 1652, respectively;
[1057] l) SEQ ID NOs: 1618 and 1653, respectively;
[1058] m) SEQ ID NOs: 1619 and 1654, respectively;
[1059] n) SEQ ID NOs: 1620 and 1655, respectively;
[1060] o) SEQ ID NOs: 1621 and 1656, respectively;
[1061] p) SEQ ID NOs: 1622 and 1657, respectively;
[1062] q) SEQ ID NOs: 1623 and 1658, respectively;
[1063] r) SEQ ID NOs: 1624 and 1659, respectively;
[1064] s) SEQ ID NOs: 1625 and 1660, respectively;
[1065] t) SEQ ID NOs: 1626 and 1661, respectively;
[1066] u) SEQ ID NOs: 1627 and 1662, respectively;
[1067] v) SEQ ID NOs: 1628 and 1663, respectively;
[1068] w) SEQ ID NOs: 1629 and 1664, respectively;
[1069] x) SEQ ID NOs: 1630 and 1665, respectively;
[1070] y) SEQ ID NOs: 1631 and 1666, respectively;
[1071] z) SEQ ID NOs: 1632 and 1667, respectively;
[1072] aa) SEQ ID NOs: 1633 and 1668, respectively;
[1073] bb) SEQ ID NOs: 1634 and 1669, respectively;
[1074] cc) SEQ ID NOs: 1635 and 1670, respectively;
[1075] dd) SEQ ID NOs: 1636 and 1671, respectively;
[1076] ee) SEQ ID NOs: 1637 and 1672, respectively;
[1077] ff) SEQ ID NOs: 1638 and 1673, respectively;
[1078] gg) SEQ ID NOs: 1639 and 1674, respectively;
[1079] hh) SEQ ID NOs: 1640 and 1675, respectively;
[1080] ii) SEQ ID NOs: 1641 and 1676, respectively; and
[1081] jj) SEQ ID NOs: 1682 and 1656, respectively.

[1082] In some embodiments, the oligonucleotide is for reducing SNCA gene expression and comprises a sense strand and an antisense strand comprising nucleotide sequences selected from the group consisting of:
[1083] a) SEQ ID NOs: 1610 and 1645, respectively;
[1084] b) SEQ ID NOs: 1614 and 1649, respectively;
[1085] c) SEQ ID NOs: 1616 and 1651, respectively;
[1086] d) SEQ ID NOs: 1621 and 1656, respectively;
[1087] e) SEQ ID NOs: 1622 and 1657, respectively;
[1088] f) SEQ ID NOs: 1623 and 1658, respectively;
[1089] g) SEQ ID NOs: 1629 and 1664, respectively;
[1090] h) SEQ ID NOs: 1630 and 1665, respectively;
[1091] i) SEQ ID NOs: 1634 and 1669, respectively;
[1092] j) SEQ ID NOs: 1635 and 1670, respectively;
[1093] k) SEQ ID NOs: 1636 and 1671, respectively;
[1094] l) SEQ ID NOs: 1640 and 1675, respectively; and
[1095] m) SEQ ID NOs: 1682 and 1656, respectively.

[1096] In some embodiments, the oligonucleotide is for reducing SNCA gene expression and comprises a sense strand and an antisense strand comprising nucleotide sequences selected from the group consisting of:
[1097] a) SEQ ID NOs: 1623 and 1658, respectively;
[1098] b) SEQ ID NOs: 1630 and 1665, respectively;
[1099] c) SEQ ID NOs: 1634 and 1669, respectively;
[1100] d) SEQ ID NOs: 1621 and 1656, respectively;
[1101] e) SEQ ID NOs: 1640 and 1675, respectively; and,
[1102] f) SEQ ID NOs: 1682 and 1656, respectively.

[1103] In some embodiments, the oligonucleotide is for reducing SNCA gene expression and comprises a sense strand comprising the nucleotide sequence as set forth in SEQ ID NO: 1623 and an antisense strand comprising the nucleotide sequence as set forth in SEQ ID NO: 1658. In some embodiments, the oligonucleotide is for reducing SNCA gene expression and comprises a sense strand comprising the nucleotide sequence as set forth in SEQ ID NO: 1630 and an antisense strand comprising the nucleotide sequence as set forth in SEQ ID NO: 1665. In some embodiments, the oligonucleotide is for reducing SNCA gene expression and comprises a sense strand comprising the nucleotide sequence as set forth in SEQ ID NO: 1634 and an antisense strand comprising the nucleotide sequence as set forth in SEQ ID NO: 1669. In some embodiments, the oligonucleotide is for reducing SNCA gene expression and comprises a sense strand comprising the nucleotide sequence as set forth in SEQ ID NO: 1621 and an antisense strand comprising the nucleotide sequence as set forth in SEQ ID NO: 1656. In some embodiments, the oligonucleotide is for reducing SNCA gene expression and comprises a sense strand comprising the nucleotide sequence as set forth in SEQ ID NO: 1640 and an antisense strand comprising the nucleotide sequence as set forth in SEQ ID NO: 1675. In some embodiments, the oligonucleotide is for reducing SNCA gene expression and comprises a sense strand comprising the nucleotide sequence as set forth in SEQ ID NO: 1682 and an antisense strand comprising the nucleotide sequence as set forth in SEQ ID NO: 1656.

### Formulations

[1104] Various formulations have been developed to facilitate oligonucleotide use. For example, oligonucleotides (e.g., RNAi oligonucleotides) can be delivered to a subject or a cellular environment using a formulation that minimizes degradation, facilitates delivery and/or uptake, or provides another beneficial property to the oligonucleotide in the formulation. In some embodiments, the formulation is a composition comprising oligonucleotides that reduce SNCA gene expression. Such a composition can be suitably formulated such that when administered to a subject, either into the immediate environment of a target cell or systemically, a sufficient portion of the oligonucleotides enter the cell to reduce SNCA gene expression. Any variety of suitable oligonucleotide formulations can be used to deliver oligonucleotides for the reduction of SNCA gene expression. In some embodiments, the oligonucleotides are formulated in buffer solutions such as phosphate buffered saline solutions, liposomes, micellar structures, and capsids. In other embodiments, the oligonucleotides are formulated in buffer solutions such as phosphate buffered saline solutions.

[1105] Formulations of oligonucleotides with cationic lipids can be used to facilitate transfection of the oligonucleotides into cells. For example, cationic lipids, such as lipofectin, cationic glycerol derivatives, and polycationic molecules (e.g., polylysine) can be used. Suitable lipids include Oligofectamine, Lipofectamine (Life Technologies), NC388 (Ribozyme Pharmaceuticals, Inc.; Boulder, CO), or FuGene 6 (Roche), all of which can be used according to the manufacturer's instructions. In some embodiments, the oligonucleotide is not formulated with a component to facilitate transfection into cells.

[1106] Accordingly, in some embodiments, the formulation comprises a lipid nanoparticle. In some embodiments, the lipid nanoparticle comprises a liposome, a lipid, a lipid complex, a microsphere, a microparticle, a nanosphere or a nanoparticle, or may be otherwise formulated for administration to the cells, tissues, organs, or body of a subject in need thereof (see, e.g., Remington: THE SCIENCE AND PRACTICE OF PHARMACY, 22nd ed, Pharmaceutical Press, 2013).

[1107] In some embodiments, the formulation comprises an excipient, which confers to a composition improved stability, improved absorption, improved solubility, and/or therapeutic enhancement of the active ingredient. In some embodiments, the excipient is a buffering agent (e.g., sodium citrate, sodium phosphate, a tris base, or sodium hydroxide) or a vehicle (e.g., a buffered solution, petrolatum, dimethyl sulfoxide, or mineral oil). In some embodiments, the oligonucleotide is lyophilized for extending its shelf-life and then made into a solution before use (e.g., administration to a subject). Accordingly, the excipient may be a lyoprotectant (e.g., mannitol, lactose, polyethylene glycol, or polyvinylpyrrolidone) or a collapse temperature modifier (e.g., dextran, Ficoll™ or gelatin).

[1108] In some embodiments, the formulation is a pharmaceutical composition compatible with its intended route of administration. Examples of routes of administration include, but are not limited to, parenteral (e.g., intravenous, intramuscular, intraperitoneal, intradermal, subcutaneous), oral (e.g., inhalation), transdermal (e.g., topical), transmucosal, and rectal administration.

[1109] In some embodiments, the formulation is formulated for administration into the CNS. In some embodiments, the formulation is formulated for administration into the cerebral spinal fluid. In some embodiments, the formulation is formulated for administration to the spinal cord. In some embodiments, the formulation is formulated for intrathecal administration. In some embodiments, the formulation is formulated for administration to the brain. In some embodiments, the formulation is formulated for intracerebroventricular administration. In some embodiments, the formulation is formulated for the brain stem. In some embodiments, the formulation is formulated for intracisternal magna administration.

[1110] Pharmaceutical compositions suitable for injectable use include sterile aqueous solutions (where water soluble) or dispersions and sterile powders for the extemporaneous preparation of sterile injectable solutions or dispersion. For intravenous administration, suitable carriers include physiological saline, bacteriostatic water, Cremophor EL™ (BASF; Parsippany, NJ), or phosphate buffered saline (PBS). The carrier can be a solvent or dispersion medium containing, for example, water, ethanol, polyol (e.g., glycerol, propylene glycol, and liquid polyethylene glycol, and the like), and suitable mixtures thereof. In many cases, it will be preferable to include isotonic agents, for example, sugars, polyalcohols such as mannitol, sorbitol, sodium chloride in the composition. Sterile injectable solutions can be prepared by incorporating the oligonucleotides in a required amount in a selected solvent with one or a combination of ingredients enumerated above, as required, followed by filtered sterilization.

[1111] In some embodiments, the formulation may contain at least about 0.1% of the oligonucleotide or more, although the percentage of the active ingredient(s) may be between about 1% to about 80% or more of the weight or volume of the total composition. Factors such as solubility, bioavailability, biological half-life, route of administration, product shelf life, as well as other pharmacological considerations will be contemplated by one skilled in the art of preparing such pharmaceutical formulations, and as such, a variety of dosages and treatment regimens may be desirable.

### Methods of Use

### Reducing SNCA Expression

[1112] In some embodiments, methods of contacting or delivering to a cell or population of cells comprise administering an effective amount of an oligonucleotide (e.g., a RNAi oligonucleotide) to reduce SNCA gene expression. In some embodiments, a reduction of SNCA gene expression is determined by measuring a reduction in the amount or level of SNCA mRNA, SNCA protein, SNCA activity in a cell, or a combination thereof. The methods include those described herein and known to one of ordinary skill in the art.

[1113] In some embodiments, methods of reducing SNCA gene expression in the CNS comprise administering an effective amount of an oligonucleotide (e.g., a RNAi oligonucleotide) to reduce SNCA gene expression. In some embodiments, the CNS comprises the brain and spinal cord. In some embodiments, SNCA gene expression is reduced in at least one region of the brain, which includes, but is not limited to, the cervical spinal cord, thoracic spinal cord, lumbar spinal cord, frontal cortex, temporal cortex, cerebellum, midbrain, occipital cortex, parietal cortex, hippocampus, caudate nucleus, thalamus, and brainstem. In some embodiments, SNCA gene expression is reduced in at least one region of the spinal cord, which includes, but is not limited to, the cervical spinal cord, thoracic spinal cord, and lumbar spinal cord. In some embodiments, SNCA gene expression is reduced in at least one region of the brain and at least one region of the spinal cord. In some embodiments, SNCA gene expression is reduced in at least one of the cervical spinal cord, thoracic spinal cord, lumbar spinal cord, frontal cortex, temporal cortex, cerebellum, midbrain, occipital cortex, parietal cortex, hippocampus, caudate nucleus, thalamus, brainstem, motor cortex, globus pallidus, midbrain tegmentum, substantia nigra, pons, cerebellar white matter, and cerebellar dentate nucleus. In some embodiments, SNCA gene expression is reduced in at least one of the lumbar spinal cord, thoracic spinal cord, and cervical spinal cord. In some embodiments, SNCA gene expression is reduced in tissue of the brain and/or spinal cord associated with Parkinson's disease. In some embodiments, tissue associated with Parkinson's disease includes, but is not limited to, putamen, midbrain tegmentum, substantia nigra, pons, and medulla. In some embodiments, SNCA gene expression is reduced in tissue of the brain and/or spinal cord associated with multiple systems atrophy. In some embodiments, tissue associated with Parkinson's disease includes, but is not limited to, caudate nucleus, putamen, midbrain tegmentum, substantia nigra, pons, cerebellar cortex, cerebellar white matter, medulla, cervical spinal cord, thoracic spinal cord, and lumbar spinal cord.

[1114] In some embodiments, SNCA gene expression is reduced for about 1 week to about 12 weeks after administration of an oligonucleotide or a formulation including the same. In some embodiments, SNCA gene expression is reduced for 1, 2, 3, 4, 5, 6, 7, 8, 9, 10, 11, or 12 weeks after administration of the oligonucleotide or the formulation. In some embodiments, SNCA gene expression is reduced for about 1 month to about 4 months after administration of the oligonucleotide or the formulation. In some embodiments, SNCA gene expression is reduced for about 1 month to about 6 months after administration of the oligonucleotide or the formulation. In some embodiments, SNCA gene expression is reduced for 1, 2, 3, or 4 months after administration of the oligonucleotide or the formulation. In some embodiments, SNCA gene expression is reduced for 1, 2, 3 4, 5, or 6 months after administration of the oligonucleotide or the formulation. In some embodiments, SNCA gene expression is reduced for about 7 days to about 91 days after administration of the oligonucleotide or the formulation. In some embodiments, SNCA gene expression is reduced for 7, 14, 21, 28, 35, 42, 49, 56, 63, 70, 77, 84, or 91 days after administration of the oligonucleotide or the formulation.

[1115] In some embodiments, SNCA gene expression is reduced in at least one region of the brain and/or at least one region of the spinal cord for about 1 to about 12 weeks after administration of the oligonucleotide or the formulation. In some embodiments, SNCA gene expression is reduced in at least one region of the brain and/or at least one region of the spinal cord for 1, 2, 3, 4, 5, 6, 7, 8, 9, 10, 11, or 12 weeks after administration of the oligonucleotide or the formulation. In some embodiments, SNCA gene expression is reduced in at least one region of the brain and/or at least one region of the spinal cord for about 1 month to about 4 months after administration of the oligonucleotide or the formulation. In some embodiments, SNCA gene expression is reduced in at least one region of the brain and/or at least one region of the spinal cord for about 1 month to about 6 months after administration of the oligonucleotide or the formulation. In some embodiments, SNCA gene expression is reduced in at least one region of the brain and/or at least one region of the spinal cord for 1, 2, 3, or 4 months after administration of the oligonucleotide or the formulation. In some embodiments, SNCA gene expression is reduced in at least one region of the brain and/or at least one region of the spinal cord for 1, 2, 3 4, 5, or 6 months after administration of the oligonucleotide or the formulation. In some embodiments, SNCA gene expression is reduced in at least one region of the brain and/or at least one region of the spinal cord for about 7 days to about 91 days after administration of the oligonucleotide or the formulation. In some embodiments, SNCA gene expression is reduced in at least one region of the brain and/or at least one region of the spinal cord for 7, 14, 21, 28, 35, 42, 49, 56, 63, 70, 77, 84, or 91 days after administration of the oligonucleotide or the formulation.

[1116] The methods herein are useful in any appropriate cell type. In some embodiments, the cell type is any cell that expresses SNCA mRNA (e.g., oligodendrocyte). In some embodiments, the cell type is a primary cell obtained from a subject. In some embodiments, the primary cell has undergone a limited number of passages such that the cell substantially maintains is natural phenotypic properties. In some embodiments, a cell to which the oligonucleotide is delivered is ex vivo or in vitro (i.e., can be delivered to a cell in culture or to an organism in which the cell resides).

[1117] In some embodiments, the oligonucleotide is delivered to a cell or population of cells using a nucleic acid delivery method known in the art including, but not limited to, injection of a solution or pharmaceutical composition containing the oligonucleotide (i.e., a formulation), bombardment by particles covered by the oligonucleotide, exposing the cell or population of cells to a solution containing the oligonucleotide, or electroporation of cell membranes in the presence of the oligonucleotide. Other methods known in the art for delivering oligonucleotides to cells may be used, such as lipid-mediated carrier transport, chemical-mediated transport, and cationic liposome transfection such as calcium phosphate, and others.

[1118] In some embodiments, reduction of SNCA gene expression is determined by an assay or technique that evaluates one or more molecules, properties or characteristics of a cell or population of cells associated with SNCA gene expression, or by an assay or technique that evaluates molecules that are directly indicative of SNCA gene expression in a cell or population of cells (e.g., SNCA mRNA or SNCA protein). In some embodiments, the extent to which the oligonucleotide reduces SNCA gene expression is evaluated by comparing SNCA gene expression in a cell or population of cells contacted with the oligonucleotide to a control cell or population of cells (e.g., a cell or population of cells not contacted with the oligonucleotide or contacted with a control oligonucleotide). In some embodiments, a control amount or level of SNCA gene expression in a control cell or population of cells is predetermined, such that the control amount or level need not be measured in every instance the assay or technique is performed. The predetermined level or value can take a variety of forms. In some embodiments, a predetermined level or value can be single cut-off value, such as a median or mean.

[1119] In some embodiments, contacting or delivering the oligonucleotide to a cell or a population of cells results in a reduction in SNCA gene expression. In some embodiments, the reduction in SNCA gene expression is relative to a control amount or level of SNCA gene expression in cell or population of cells not contacted with the oligonucleotide or contacted with a control oligonucleotide. In some embodiments, the reduction in SNCA gene expression is about 1% or lower, about 5% or lower, about 10% or lower, about 15% or lower, about 20% or lower, about 25% or lower, about 30% or lower, about 35% or lower, about 40% or lower, about 45% or lower, about 50% or lower, about 55% or lower, about 60% or lower, about 70% or lower, about 80% or lower, or about 90% or lower relative to a control amount or level of SNCA gene expression. In some embodiments, the control amount or level of SNCA gene expression is an amount or level of SNCA mRNA and/or SNCA protein and/or SNCA activity/function in a cell or population of cells that has not been contacted with the oligonucleotide. In some embodiments, the effect of delivery of the oligonucleotide to a cell or population of cells according to a method herein is assessed after any finite period or amount of time (e.g., minutes, hours, days, weeks, months). For example, in some embodiments, SNCA gene expression is determined in a cell or population of cells at least about 4 hours, about 8 hours, about 12 hours, about 18 hours, about 24 hours; or at least about 1 day, about 2 days, about 3 days, about 4 days, about 5 days, about 6 days, about 7 days, about 8 days, about 9 days, about 10 days, about 11 days, about 12 days, about 13 days, about 14 days, about 21 days, about 28 days, about 35 days, about 42 days, about 49 days, about 56 days, about 63 days, about 70 days, about 77 days, or about 84 days, or more after contacting or delivering the oligonucleotide to the cell or population of cells. In some embodiments, SNCA gene expression is determined in a cell or population of cells at least about 1 month, about 2 months, about 3 months, about 4 months, about 5 months, or about 6 months, or more after contacting or delivering the oligonucleotide to the cell or population of cells.

[1120] In some embodiments, the oligonucleotide is delivered in the form of a transgene that is engineered to express in a cell the oligonucleotide or strands comprising the oligonucleotide (e.g., its sense and antisense strands). In some embodiments, the oligonucleotide is delivered using a transgene engineered to express any oligonucleotide. Transgenes may be delivered using viral vectors (e.g., adenovirus, retrovirus, vaccinia virus, poxvirus, adeno-associated virus, or herpes simplex virus) or non-viral vectors (e.g., plasmids or synthetic mRNAs). In some embodiments, transgenes can be injected directly to a subject.

### Treatment Methods

[1121] Oligonucleotides (e.g., RNAi oligonucleotides) also are provided for use, or adaptable for use, to treat a subject (e.g., a human having a disease, disorder, or condition associated with SNCA expression) that would benefit from reducing SNCA gene expression. In some aspects, the disclosure provides oligonucleotides for use, or adapted for use, to treat a subject having a disease, disorder or condition associated with expression of SNCA. Oligonucleotides also are provided for use, or adaptable for use, in the manufacture of a medicament or formulation/pharmaceutical composition for treating a disease, disorder, or condition associated with SNCA gene expression. In some embodiments, the oligonucleotides for use, or adaptable for use, target SNCA mRNA and reduce SNCA gene expression (e.g., via the RNAi pathway). In some embodiments, the oligonucleotides for use, or adaptable for use, target SNCA mRNA and reduce the amount or level of SNCA mRNA, SNCA protein and/or SNCA activity/function.

[1122] In addition, in some embodiments of the methods herein, a subject having a disease, disorder, or condition associated with SNCA expression or is predisposed to the same is selected for treatment with the oligonucleotide or the formulation. In some embodiments, the method comprises selecting an individual having a marker (e.g., a biomarker) for a disease, disorder, or condition associated with SNCA gene expression, or predisposed to the same, such as, but not limited to, SNCA mRNA, SNCA protein, SNCA activity/function, or a combination thereof. Likewise, and as detailed below, some embodiments of the methods include steps such as measuring or obtaining a baseline value for a marker of SNCA gene expression, and then comparing such obtained value to one or more other baseline values or values obtained after the subject is administered the oligonucleotide to assess the effectiveness of treatment.

[1123] Methods of treating a subject having, suspected of having, or at risk of developing a disease, disorder, or condition associated with SNCA gene expression with the oligonucleotide or formulation are provided herein. In some aspects, methods of treating or attenuating the onset or progression of a disease, disorder, or condition associated with SNCA gene expression using the oligonucleotide or formulation are provided herein. In other aspects, methods to achieve one or more therapeutic benefits in a subject having a disease, disorder, or condition associated with SNCA gene expression using the oligonucleotide or formulation are provided herein. In some embodiments, the subject is treated by administering a therapeutically effective amount of any one or more of the oligonucleotides provided herein. In some embodiments, treatment comprises reducing SNCA gene expression. In some embodiments, the subject is treated therapeutically. In other embodiments, the subject is treated prophylactically.

[1124] In some embodiments of the methods herein, the oligonucleotide, or a pharmaceutical composition comprising the oligonucleotide, is administered to a subject having a disease, disorder, or condition associated with SNCA expression such that SNCA gene expression is reduced in the subject, thereby treating the subject. In some embodiments, an amount or level of SNCA mRNA is reduced in the subject. In some embodiments, an amount or level of SNCA protein is reduced in the subject. In other embodiments, an amount or level of SNCA activity/function is reduced in the subject.

[1125] In some embodiments, the oligonucleotide or pharmaceutical composition/formulation comprising the oligonucleotide, is administered to a subject having a disease, disorder, or condition associated with SNCA gene expression such that SNCA expression is reduced in the subject by at least about 30%, about 35%, about 40%, about 45%, about 50%, about 55%, about 60%, about 65%, about 70%, about 75%, about 80%, about 85%, about 90%, about 95%, about 99%, or greater than 99% when compared to SNCA expression prior to administration of the oligonucleotide or pharmaceutical composition. In some embodiments of the methods herein, the oligonucleotide or the pharmaceutical composition is administered to a subject having a disease, disorder, or condition associated with SNCA gene expression such that SNCA expression is reduced in the subject by at least about 30%, about 35%, about 40%, about 45%, about 50%, about 55%, about 60%, about 65%, about 70%, about 75%, about 80%, about 85%, about 90%, about 95%, about 99%, or greater than 99% for about 1 week to about 12 weeks, about 1 month to about 6 months, or about 7 days to about 91 days when compared to SNCA expression prior to administration of the oligonucleotide or pharmaceutical composition. In some embodiments, SNCA expression is reduced in the subject by at least about 30%, about 35%, about 40%, about 45%, about 50%, about 55%, about 60%, about 65%, about 70%, about 75%, about 80%, about 85%, about 90%, about 95%, about 99%, or greater than 99% when compared to SNCA expression in a subject (e.g., a reference or control subject) not receiving the oligonucleotide or pharmaceutical composition or receiving a control oligonucleotide, pharmaceutical composition, or treatment. In some embodiments, SNCA expression is reduced in the subject by at least about 30%, about 35%, about 40%, about 45%, about 50%, about 55%, about 60%, about 65%, about 70%, about 75%, about 80%, about 85%, about 90%, about 95%, about 99%, or greater than 99% for about 1 week to about 12 weeks, about 1 month to about 6 months, or about 7 days to about 91 days when compared to SNCA expression in a subject (e.g., a reference or control subject) not receiving the oligonucleotide or pharmaceutical composition or receiving a control oligonucleotide, pharmaceutical composition or treatment.

[1126] In some embodiments of the methods herein, the oligonucleotide or the pharmaceutical composition is administered to a subject having a disease, disorder, or condition associated with SNCA gene expression such that an amount or level of SNCA mRNA is reduced in the subject by at least about 30%, about 35%, about 40%, about 45%, about 50%, about 55%, about 60%, about 65%, about 70%, about 75%, about 80%, about 85%, about 90%, about 95%, about 99%, or greater than 99% when compared to the amount or level of SNCA mRNA prior to administration of the oligonucleotide or pharmaceutical composition. In some embodiments of the methods herein, the oligonucleotide or the pharmaceutical composition is administered to a subject having a disease, disorder, or condition associated with SNCA gene expression such that an amount or level of SNCA mRNA is reduced in the subject by at least about 30%, about 35%, about 40%, about 45%, about 50%, about 55%, about 60%, about 65%, about 70%, about 75%, about 80%, about 85%, about 90%, about 95%, about 99%, or greater than 99% for about 1 week to about 12 weeks, about 1 month to about 6 months, or about 7 days to about 91 days when compared to the amount or level of SNCA mRNA prior to administration of the oligonucleotide or pharmaceutical composition. In some embodiments, an amount or level of SNCA mRNA is reduced in the subject by at least about 30%, about 35%, about 40%, about 45%, about 50%, about 55%, about 60%, about 65%, about 70%, about 75%, about 80%, about 85%, about 90%, about 95%, about 99%, or greater than 99% when compared to an amount or level of SNCA mRNA in a subject (e.g., a reference or control subject) not receiving the oligonucleotide or pharmaceutical composition or receiving a control oligonucleotide, pharmaceutical composition, or treatment. In some embodiments, an amount or level of SNCA mRNA is reduced in the subject by at least about 30%, about 35%, about 40%, about 45%, about 50%, about 55%, about 60%, about 65%, about 70%, about 75%, about 80%, about 85%, about 90%, about 95%, about 99%, or greater than 99% for about 1 week to about 12 weeks, about 1 month to about 6 months, or about 7 days to about 91 days when compared to an amount or level of SNCA mRNA in a subject (e.g., a reference or control subject) not receiving the oligonucleotide or pharmaceutical composition or receiving a control oligonucleotide, pharmaceutical composition, or treatment.

[1127] In some embodiments of the methods herein, the oligonucleotide or the pharmaceutical composition is administered to a subject having a disease, disorder, or condition associated with SNCA gene expression such that an amount or level of SNCA protein is reduced in the subject by at least about 30%, about 35%, about 40%, about 45%, about 50%, about 55%, about 60%, about 65%, about 70%, about 75%, about 80%, about 85%, about 90%, about 95%, about 99%, or greater than 99% when compared to the amount or level of SNCA protein prior to administration of the oligonucleotide or pharmaceutical composition. In some embodiments of the methods herein, the oligonucleotide or the pharmaceutical composition is administered to a subject having a disease, disorder, or condition associated with SNCA gene expression such that an amount or level of SNCA protein is reduced in the subject by at least about 30%, about 35%, about 40%, about 45%, about 50%, about 55%, about 60%, about 65%, about 70%, about 75%, about 80%, about 85%, about 90%, about 95%, about 99%, or greater than 99% for about 1 week to about 12 weeks, about 1 month to about 6 months, or about 7 days to about 91 days when compared to the amount or level of SNCA protein prior to administration of the oligonucleotide or pharmaceutical composition. In some embodiments, an amount or level of SNCA protein is reduced in the subject by at least about 30%, about 35%, about 40%, about 45%, about 50%, about 55%, about 60%, about 65%, about 70%, about 75%, about 80%, about 85%, about 90%, about 95%, about 99%, or greater than 99% when compared to an amount or level of SNCA protein in a subject (e.g., a reference or control subject) not receiving the oligonucleotide or pharmaceutical composition or receiving a control oligonucleotide, pharmaceutical composition, or treatment. In some embodiments, an amount or level of SNCA protein is reduced in the subject by at least about 30%, about 35%, about 40%, about 45%, about 50%, about 55%, about 60%, about 65%, about 70%, about 75%, about 80%, about 85%, about 90%, about 95%, about 99%, or greater than 99% for about 1 week to about 12 weeks, about 1 month to about 6 months, or about 7 days to about 91 days when compared to an amount or level of SNCA protein in a subject (e.g., a reference or control subject) not receiving the oligonucleotide or pharmaceutical composition or receiving a control oligonucleotide, pharmaceutical composition, or treatment.

[1128] In some embodiments of the methods herein, the oligonucleotide or the pharmaceutical composition is administered to a subject having a disease, disorder, or condition associated with SNCA gene expression such that an amount or level of SNCA activity/function is reduced in the subject by at least about 30%, about 35%, about 40%, about 45%, about 50%, about 55%, about 60%, about 65%, about 70%, about 75%, about 80%, about 85%, about 90%, about 95%, about 99%, or greater than 99% when compared to the amount or level of SNCA activity/function prior to administration of the oligonucleotide or pharmaceutical composition. In some embodiments of the methods herein, the oligonucleotide or the pharmaceutical composition is administered to a subject having a disease, disorder, or condition associated with SNCA gene expression such that an amount or level of SNCA activity/function is reduced in the subject by at least about 30%, about 35%, about 40%, about 45%, about 50%, about 55%, about 60%, about 65%, about 70%, about 75%, about 80%, about 85%, about 90%, about 95%, about 99%, or greater than 99% for about 1 week to about 12 weeks, about 1 month to about 6 months, or about 7 days to about 91 days when compared to the amount or level of SNCA activity/function prior to administration of the oligonucleotide or pharmaceutical composition. In some embodiments, an amount or level of SNCA activity/function is reduced in the subject by at least about 30%, about 35%, about 40%, about 45%, about 50%, about 55%, about 60%, about 65%, about 70%, about 75%, about 80%, about 85%, about 90%, about 95%, about 99%, or greater than 99% when compared to an amount or level of SNCA activity/function in a subject (e.g., a reference or control subject) not receiving the oligonucleotide or pharmaceutical composition or receiving a control oligonucleotide, pharmaceutical composition or treatment. In some embodiments, an amount or level of SNCA activity/function is reduced in the subject by at least about 30%, about 35%, about 40%, about 45%, about 50%, about 55%, about 60%, about 65%, about 70%, about 75%, about 80%, about 85%, about 90%, about 95%, about 99%, or greater than 99% for about 1 week to about 12 weeks, about 1 month to about 6 months, or about 7 days to about 91 days when compared to an amount or level of SNCA activity/function in a subject (e.g., a reference or control subject) not receiving the oligonucleotide or pharmaceutical composition or receiving a control oligonucleotide, pharmaceutical composition, or treatment.

[1129] Suitable methods for determining SNCA gene expression such as SNCA expression, an amount or level of SNCA mRNA, an amount or level of SNCA protein, and/or an amount or level of SNCA activity/function in the subject, or in a sample from the subject, are known in the art. Further, the Examples set forth herein illustrate exemplary methods for determining SNCA gene expression.

[1130] In some embodiments, SNCA gene expression such as SNCA expression, an amount or level of SNCA mRNA, an amount or level of SNCA protein, an amount or level of SNCA activity/function, or any combination thereof, is reduced in a cell (e.g., an oligodendrocyte), a population or a group of cells (e.g., an organoid), an organ (e.g., frontal cortex), blood or a fraction thereof (e.g., plasma), a tissue (e.g., brain tissue), a sample (e.g., a brain biopsy sample), or any other biological material obtained or isolated from the subject. In some embodiments, SNCA expression, an amount or level of SNCA mRNA, an amount or level of SNCA protein, an amount or level of SNCA activity/function, or any combination thereof, is reduced in more than one type of cell (e.g., an oligodendrocyte and one or more other type(s) of cell), more than one groups of cells, more than one organ (e.g., brain and one or more other organ(s)), more than one fraction of blood (e.g., plasma and one or more other blood fraction(s)), more than one type of tissue (e.g., brain tissue and one or more other type(s) of tissue), more than one type of sample (e.g., a brain biopsy sample and one or more other type(s) of biopsy sample) obtained or isolated from the subject. In some embodiments, SNCA expression, an amount or level of SNCA mRNA, an amount or level of SNCA protein, an amount or level of SNCA activity/function, or any combination thereof is reduced in one or more of the cervical spinal cord, thoracic spinal cord, lumbar spinal cord, frontal cortex, temporal cortex, cerebellum, midbrain, occipital cortex, parietal cortex, hippocampus, caudate nucleus, thalamus, brainstem, motor cortex, globus pallidus, midbrain tegmentum, substantia nigra, pons, cerebellar white matter, and cerebellar dentate nucleus. In some embodiments, SNCA expression, an amount or level of SNCA mRNA, an amount or level of SNCA protein, an amount or level of SNCA activity/function, or any combination thereof is reduced in tissue of the brain and/or spinal cord associated with Parkinson's disease. In some embodiments, tissue associated with Parkinson's disease includes, but is not limited to, putamen, midbrain tegmentum, substantia nigra, pons, and medulla. In some embodiments, SNCA expression, an amount or level of SNCA mRNA, an amount or level of SNCA protein, an amount or level of SNCA activity/function, or any combination thereof is reduced in tissue of the brain and/or spinal cord associated with multiple system atrophy. In some embodiments, tissue associated with multiple system atrophy includes, but is not limited to caudate nucleus, putamen, midbrain tegmentum, substantia nigra, pons, cerebellar cortex, cerebellar white matter, medulla, cervical spinal cord, thoracic spinal cord, and lumbar spinal cord.

[1131] Examples of a disease, disorder or condition associated with SNCA gene expression include, multiple system atrophy, dementia with Lewy bodies, and Parkinson disease.

[1132] Because of their high specificity, the oligonucleotide herein specifically targets SNCA mRNA of target genes of cells, tissue(s), or organ(s) (e.g., brain). In preventing disease, the target gene may be one which is required for initiation or maintenance of the disease or which has been identified as being associated with a higher risk of contracting the disease. In treating disease, the oligonucleotide can be brought into contact with the cells, tissue(s), or organ(s) (e.g., brain) exhibiting or responsible for mediating the disease. For example, an oligonucleotide substantially identical to all or part of a wild-type (i.e., native) or mutated gene associated with a disease, disorder, or condition associated with SNCA gene expression may be brought into contact with or introduced into a cell or tissue type of interest such as an oligodendrocyte or other brain cell.

[1133] In some embodiments, SNCA may be from any mammal, such as a human and may be silenced according to the method described herein.

[1134] The methods herein typically involve administering to a subject a therapeutically effective amount of the oligonucleotide, that is, an amount capable of producing a desirable therapeutic result. A therapeutically acceptable amount may be an amount that can therapeutically treat a disease, disorder, or condition. The appropriate amount/dosage for any one subject will depend on certain factors, including the subject's size, body surface area, age, the particular composition to be administered, the active ingredient(s) in the composition, time and route of administration, general health, and other drugs being administered concurrently.

[1135] In some embodiments, the subject is administered any one of the oligonucleotides or compositions herein either enterally (e.g., orally, by gastric feeding tube, by duodenal feeding tube, via gastrostomy or rectally), parenterally (e.g., subcutaneous injection, intravenous injection or infusion, intra-arterial injection or infusion, intraosseous infusion, intramuscular injection, intracerebral injection, intracerebroventricular injection, intrathecal), topically (e.g., epicutaneous, inhalational, via eye drops, or through a mucous membrane), or by direct injection into a target organ (e.g., the brain of a subject). Typically, the oligonucleotide or composition is administered intravenously or subcutaneously. In some embodiments, the oligonucleotide or composition is administered to the cerebral spinal fluid. In some embodiments, the oligonucleotide or composition is administered intrathecally. In some embodiments, the oligonucleotide or composition is administered intracerebroventricularly. In some embodiments, the oligonucleotide or composition is administered by intracisternal magna injection.

[1136] As a non-limiting set of examples, the oligonucleotide would typically be administered quarterly (once every three months), bi-monthly (once every two months), monthly, or weekly. For example, the oligonucleotide may be administered every week or at intervals of two, or three weeks. Alternatively, the oligonucleotide may be administered daily. In some embodiments, a subject is administered one or more loading doses of the oligonucleotide followed by one or more maintenance doses of the oligonucleotide.

[1137] In some embodiments, the subject to be treated is a human or non-human primate or other mammalian subject. Other exemplary subjects include domesticated animals such as dogs and cats; livestock such as horses, cattle, pigs, sheep, goats, and chickens; and animals such as mice, rats, guinea pigs, and hamsters.

### Kits

[1138] In some embodiments, a kit is provided comprising an oligonucleotide described herein (e.g., a RNAi oligonucleotide), and instructions for its use. In some embodiments, the kit comprises the oligonucleotide, and a package insert containing instructions for use of the kit and/or any component thereof. In some embodiments, the kit comprises, in a suitable container, the oligonucleotide, one or more controls, and various buffers, reagents, enzymes, and other standard ingredients well known in the art. In some embodiments, the container comprises at least one vial, well, test tube, flask, bottle, syringe, or other container means, into which the oligonucleotide is placed, and in some instances, suitably aliquoted. In some embodiments where an additional component is provided, the kit contains additional containers into which this component is placed. The kits can also include a means for containing the oligonucleotide and any other reagent in close confinement for commercial sale. Such containers may include injection or blow-molded plastic containers into which the desired vials are retained. Containers and/or kits can include labeling with instructions for use and/or warnings.

[1139] In some embodiments, the kit comprises the oligonucleotide and a pharmaceutically acceptable carrier, or the pharmaceutical composition, and instructions for treating or delaying progression of a disease, disorder, or condition associated with SNCA gene expression in a subject in need thereof.

[1140] In some embodiments, the kit comprises the oligonucleotide and a pharmaceutically acceptable carrier, or the pharmaceutical composition, and instructions for administering the oligonucleotide or pharmaceutical composition to the cerebral spinal fluid to reduce SNCA gene expression in at least one region of the brain and/or at least one region of the spinal cord in a subject in need thereof.

### Definitions

[1141] As used herein, “approximately” or “about,” as applied to one or more values of interest, refers to a value that is similar to a stated reference value. In certain embodiments, “about” refers to a range of values that fall within 25%, 20%, 19%, 18%, 17%, 16%, 15%, 14%, 13%, 12%, 11%, 10%, 9%, 8%, 7%, 6%, 5%, 4%, 3%, 2%, 1%, or less in either direction (greater than or less than) of the stated reference value unless otherwise stated or otherwise evident from the context (except where such number would exceed 100% of a possible value).

[1142] As used herein, “administer,” “administering,” “administration” and the like refer to providing a substance (e.g., an oligonucleotide) to a subject in a manner that is pharmacologically useful (e.g., to treat a disease, disorder, or condition in the subject).

[1143] As used herein, “asialoglycoprotein receptor” or “ASGPR” refers to a bipartite C-type lectin formed by a major 48 kDa subunit (ASGPR-1) and minor 40 kDa subunit (ASGPR-2). ASGPR is primarily expressed on the sinusoidal surface of hepatocyte cells and has a major role in binding, internalizing, and subsequent clearing of circulating glycoproteins that contain terminal galactose or GalNAc residues (asialoglycoproteins).

[1144] As used herein, “attenuate,” “attenuating,” “attenuation” and the like refer to reducing or effectively halting. As a non-limiting example, one or more of the treatments herein may reduce or effectively halt the onset or progression of a disease, disorder, or condition associated with SNCA gene expression in a subject. This attenuation may be exemplified by, for example, a decrease in one or more aspects (e.g., symptoms, tissue characteristics, and cellular, inflammatory, or immunological activity, etc.) of a disease associated with SNCA gene expression, no detectable progression (worsening) of one or more aspects of the disease, disorder, or condition, or no detectable aspects of the disease in a subject when they might otherwise be expected.

[1145] As used herein, “complementary” refers to a structural relationship between two nucleotides (e.g., on two opposing nucleic acids or on opposing regions of a single nucleic acid strand) that permits the two nucleotides to form base pairs with one another. For example, a purine nucleotide of one nucleic acid that is complementary to a pyrimidine nucleotide of an opposing nucleic acid may base pair together by forming hydrogen bonds with one another. In some embodiments, complementary nucleotides can base pair in the Watson-Crick manner or in any other manner that allows for the formation of stable duplexes. In some embodiments, two nucleic acids may have regions of multiple nucleotides that are complementary with each other to form regions of complementarity, as described herein.

[1146] As used herein, “deoxyribonucleotide” refers to a nucleotide having a hydrogen in place of a hydroxyl at the 2′ position of its pentose sugar when compared with a ribonucleotide. A modified deoxyribonucleotide is a deoxyribonucleotide having one or more modifications or substitutions of atoms other than at the 2′ position, including modifications or substitutions in or of the sugar, phosphate group or base.

[1147] As used herein, “double-stranded oligonucleotide” or “ds oligonucleotide” refers to an oligonucleotide that is substantially in a duplex form. In some embodiments, the complementary base-pairing of duplex region(s) of a ds oligonucleotide is formed between antiparallel sequences of nucleotides of covalently separate nucleic acid strands. In some embodiments, complementary base-pairing of duplex region(s) of a ds oligonucleotide is formed between antiparallel sequences of nucleotides of nucleic acid strands that are covalently linked. In some embodiments, complementary base-pairing of duplex region(s) of a ds oligonucleotide is formed from single nucleic acid strand that is folded (e.g., via a hairpin) to provide complementary antiparallel sequences of nucleotides that base pair together. In some embodiments, a ds oligonucleotide comprises two covalently separate nucleic acid strands that are fully duplexed with one another. However, in other embodiments, a ds oligonucleotide comprises two covalently separate nucleic acid strands that are partially duplexed (e.g., having overhangs at one or both ends). In some embodiments, a ds oligonucleotide comprises antiparallel sequence of nucleotides that are partially complementary, and thus, may have one or more mismatches, which may include internal mismatches or end mismatches.

[1148] As used herein, “duplex,” in reference to nucleic acids (e.g., oligonucleotides), refers to a structure formed through complementary base pairing of two antiparallel sequences of nucleotides.

[1149] As used herein, “excipient” refers to a non-therapeutic agent that may be included in a composition, for example, to provide or contribute to a desired consistency or stabilizing effect.

[1150] As used herein, “labile linker” refers to a linker that can be cleaved (e.g., by acidic pH). A “fairly stable linker” refers to a linker that cannot be cleaved.

[1151] As used herein, “loop” refers to a unpaired region of a nucleic acid (e.g., oligonucleotide) that is flanked by two antiparallel regions of the nucleic acid that are sufficiently complementary to one another, such that under appropriate hybridization conditions (e.g., in a phosphate buffer, in a cells), the two antiparallel regions, which flank the unpaired region, hybridize to form a duplex (referred to as a “stem”).

[1152] As used herein, “modified internucleotide linkage” refers to an internucleotide linkage having one or more chemical modifications when compared with a reference internucleotide linkage comprising a phosphodiester bond. In some embodiments, a modified nucleotide is a non-naturally occurring linkage. Typically, a modified internucleotide linkage confers one or more desirable properties to a nucleic acid in which the modified internucleotide linkage is present. For example, a modified nucleotide may improve thermal stability, resistance to degradation, nuclease resistance, solubility, bioavailability, bioactivity, reduced immunogenicity, etc.

[1153] As used herein, “modified nucleotide” refers to a nucleotide having one or more chemical modifications when compared with a corresponding reference nucleotide selected from: adenine ribonucleotide, guanine ribonucleotide, cytosine ribonucleotide, uracil ribonucleotide, adenine deoxyribonucleotide, guanine deoxyribonucleotide, cytosine deoxyribonucleotide, and thymidine deoxyribonucleotide. In some embodiments, a modified nucleotide is a non-naturally occurring nucleotide. In some embodiments, a modified nucleotide has one or more chemical modification in its sugar, nucleobase, and/or phosphate group. In some embodiments, a modified nucleotide has one or more chemical moieties conjugated to a corresponding reference nucleotide. Typically, a modified nucleotide confers one or more desirable properties to a nucleic acid in which the modified nucleotide is present. For example, a modified nucleotide may improve thermal stability, resistance to degradation, nuclease resistance, solubility, bioavailability, bioactivity, reduced immunogenicity, etc.

[1154] As used herein, “nicked tetraloop structure” or “nicked tetraL structure” refers to a structure of an oligonucleotide (e.g., a RNAi oligonucleotide) that is characterized by separate sense (passenger) and antisense (guide) strands, in which the sense strand has a region of complementarity with the antisense strand, and in which at least one of the strands, generally the sense strand, has a tetraL configured to stabilize an adjacent stem region formed within the at least one strand.

[1155] As used herein, “oligonucleotide” refers to a short nucleic acid (e.g., less than about 100 nucleotides in length). An oligonucleotide may be ss or ds. An oligonucleotide may or may not have duplex regions. As a set of non-limiting examples, an oligonucleotide may be, but is not limited to, a small interfering RNA (siRNA), microRNA (miRNA), short hairpin RNA (shRNA), dicer substrate interfering RNA (dsiRNA), antisense oligonucleotide (ASO), short siRNA, or ss siRNA. In some embodiments, the oligonucleotide is a ds oligonucleotide and is an RNAi oligonucleotide.

[1156] As used herein, “overhang” refers to terminal non-base pairing nucleotide(s) resulting from one strand or region extending beyond the terminus of a complementary strand with which the one strand or region forms a duplex. In some embodiments, an overhang comprises one or more unpaired nucleotides extending from a duplex region at the 5′ terminus or 3′ terminus of a ds oligonucleotide. In certain embodiments, the overhang is a 3′ or 5′ overhang on the antisense strand or sense strand of a ds oligonucleotides.

[1157] As used herein, “phosphate analog” refers to a chemical moiety that mimics the electrostatic and/or steric properties of a phosphate group. In some embodiments, a phosphate analog is positioned at the 5′ terminal nucleotide of an oligonucleotide in place of a 5′-phosphate, which is often susceptible to enzymatic removal. In some embodiments, a 5′ phosphate analog contains a phosphatase-resistant linkage Examples of phosphate analogs include, but are not limited to, 5′ phosphonates, such as 5′ methylenephosphonate (5′-MP) and 5′-(E)-vinylphosphonate (5′-VP). In some embodiments, an oligonucleotide has a phosphate analog at a 4′-carbon position of the sugar (referred to as a “4′-phosphate analog”) at a 5′-terminal nucleotide. An example of a 4′-phosphate analog is oxymethylphosphonate, in which the oxygen atom of the oxymethyl group is bound to the sugar moiety (e.g., at its 4′-carbon) or analog thereof. See, e.g., US Provisional Patent Application Nos. 62/383,207 (filed on 2 Sep. 2016) and 62/393,401 (filed on 12 Sep. 2016). Other modifications have been developed for the 5′ end of oligonucleotides (see, e.g., Intl. Patent Application No. WO 2011/133871; U.S. Pat. No. 8,927,513; and Prakash et al. (2015) Nucleic Acids Res. 43:2993-3011).

[1158] As used herein, “SNCA” refers to Synyclein Alpha. SNCA is found abundantly in the brain, and inhibits phospholipase D2. It functions in resynaptic signaling and membrane trafficking. The mRNA encoding wild-type human SNCA is set forth in SEQ ID NO: 1677. The mRNA encoding mouse SNCA is set forth in SEQ ID NO: 1678. The mRNA encoding monkey SNCA is set forth in SEQ ID NO: 1679.

[1159] As used herein, “reduced expression” of a gene (e.g., SNCA) refers to a decrease in the amount or level of RNA transcript (e.g., SNCA mRNA) or protein encoded by the gene and/or a decrease in the amount or level of activity/function of the gene and/or protein in a cell, a population of cells, a sample, or a subject, when compared to an appropriate reference (e.g., a reference cell, population of cells, sample, or subject). For example, the act of contacting a cell with an oligonucleotide (e.g., an oligonucleotide such as a RNAi oligonucleotide comprising an antisense strand having a nucleotide sequence that is complementary to a nucleotide sequence comprising SNCA mRNA) may result in a decrease in the amount or level of SNCA mRNA, SNCA protein and/or SNCA activity/function (e.g., via inactivation and/or degradation of SNCA mRNA by the RNAi pathway) when compared to a cell that is not treated with the oligonucleotide. Similarly, and as used herein, “reducing expression” refers to an act that results in reduced expression of a gene (e.g., SNCA).

[1160] As used herein, “reduction of SNCA gene expression” refers to a decrease in the amount or level of SNCA mRNA, SNCA protein and/or SNCA activity/function in a cell, a population of cells, a sample, or a subject when compared to an appropriate reference (e.g., a reference cell, population of cells, sample, or subject).

[1161] As used herein, “region of complementarity” refers to a sequence of nucleotides of a nucleic acid (e.g., a ds oligonucleotide) that is sufficiently complementary to an antiparallel sequence of nucleotides to permit hybridization between the two sequences of nucleotides under appropriate hybridization conditions (e.g., in a phosphate buffer, in a cell, etc.). In some embodiments, the oligonucleotide comprises a targeting sequence having a region of complementary to a mRNA target sequence.

[1162] As used herein, “ribonucleotide” refers to a nucleotide having a ribose as its pentose sugar, which contains a hydroxyl group at its 2′ position. A “modified ribonucleotide” refers to a ribonucleotide having one or more modifications or substitutions of atoms other than at the 2′ position, including modifications or substitutions in or of the ribose, phosphate group, or base.

[1163] As used herein, “RNAi oligonucleotide” refers to either (a) a ds oligonucleotide having a sense strand and an antisense strand in which the antisense strand or part of the antisense strand is used by the Argonaute 2 (Ago2) endonuclease in the cleavage of a target mRNA (e.g., SNCA mRNA) or (b) a ss oligonucleotide having a single antisense strand, where that antisense strand (or part of that antisense strand) is used by the Ago2 endonuclease in the cleavage of a target mRNA (e.g., SNCA mRNA).

[1164] As used herein, “strand” refers to a single, contiguous sequence of nucleotides linked together through internucleotide linkages (e.g., phosphodiester linkages or phosphorothioate linkages). In some embodiments, a strand has two free ends (e.g., a 5′ end and a 3′ end).

[1165] As used herein, “subject” means any mammal, including mice, rabbits, and humans. In one embodiment, the subject is a human or NHP. Moreover, “individual” or “patient” may be used interchangeably with “subject.”

[1166] As used herein, “synthetic” refers to a nucleic acid or other molecule that is artificially synthesized (e.g., using a machine such as, for example, a solid-state nucleic acid synthesizer) or that is otherwise not derived from a natural source (e.g., a cell or organism) that normally produces the molecule.

[1167] As used herein, “targeting ligand” refers to a molecule (e.g., a carbohydrate, amino sugar, cholesterol, or polypeptide) that selectively binds to a cognate molecule (e.g., a receptor) of a tissue or cell of interest and that is conjugatable to another substance for purposes of targeting the other substance to the tissue or cell of interest. For example, in some embodiments, a targeting ligand may be conjugated to an oligonucleotide for purposes of targeting the oligonucleotide to a specific tissue or cell of interest. In some embodiments, a targeting ligand selectively binds to a cell surface receptor. Accordingly, in some embodiments, a targeting ligand when conjugated to an oligonucleotide facilitates delivery of the oligonucleotide into a particular cell through selective binding to a receptor expressed on the surface of the cell and endosomal internalization by the cell of the complex comprising the oligonucleotide, targeting ligand, and receptor. In some embodiments, a targeting ligand is conjugated to an oligonucleotide via a linker that is cleaved following or during cellular internalization such that the oligonucleotide is released from the targeting ligand in the cell.

[1168] As used herein, “tetraloop” or “tetraL” refers to a loop that increases stability of an adjacent duplex formed by hybridization of flanking sequences of nucleotides. The increase in stability is detectable as an increase in melting temperature (Tₘ) of an adjacent stem duplex that is higher than the Tₘ of the adjacent stem duplex expected, on average, from a set of loops of comparable length consisting of randomly selected sequences of nucleotides. For example, a tetraL can confer a Tₘ of at least about 50° C., at least about 55° C., at least about 56° C., at least about 58° C., at least about 60° C., at least about 65° C., or at least about 75° C. in 10 mM NaHPO₄ to a hairpin comprising a duplex of at least 2 base pairs (bp) in length. In some embodiments, a tetraL may stabilize a bp in an adjacent stem duplex by stacking interactions. In addition, interactions among the nucleotides in a tetraL include, but are not limited to, non-Watson-Crick base pairing, stacking interactions, hydrogen bonding, and contact interactions (Cheong et al. (1990) Nature 346:680-682; and Heus & Pardi (1991) Science 253:191-94). In some embodiments, a tetraL comprises or consists of 3 to 6 nucleotides and is typically 4 to 5 nucleotides. In certain embodiments, a tetraL comprises or consists of 3, 4, 5, or 6 nucleotides, which may or may not be modified (e.g., which may or may not be conjugated to a targeting moiety). In certain embodiments, a tetraL comprises or consists of 3, 4, 5, or 6 nucleotides, which may or may not be modified (e.g., which may or may not be conjugated to a targeting ligand). In one embodiment, a tetraL consists of 4 nucleotides. Any nucleotide may be used in the tetraL and standard IUPAC-IUB symbols for such nucleotides may be used as described in Cornish-Bowden (1985) Nucleic Acids Res. 13:3021-30. For example, the letter “N” may be used to mean that any base may be in that position, the letter “R” may be used to show that A (adenine) or G (guanine) may be in that position, and “B” may be used to show that C (cytosine), G (guanine), T (thymine) or U (uracil) may be in that position. Examples of tetraloops include the UNCG family of tetraloops (e.g., UUCG), the GNRA family of tetraloops (e.g., GAAA), and the CUUG tetraloop (Woese et al. (1990) Proc. Natl. Acad. Sci. USA 87:8467-71; and Antao et al. (1991) Nucleic Acids Res. 19:5901-05). Examples of DNA tetraloops include the d(GNNA) family of tetraloops (e.g., d(GTTA), the d(GNRA)) family of tetraloops, the d(GNAB) family of tetraloops, the d(CNNG) family of tetraloops, and the d(TNCG) family of tetraloops (e.g., d(TTCG)). See, e.g., Nakano et al. (2002) Biochem. 41:4281-92; Shinji et al. (2000) Nippon Kagakkai Koen Yokoshu 78:731. In some embodiments, the tetraL is contained within a nicked tetraL structure.

[1169] As used herein, “treat” or “treating” refers to the act of providing care to a subject in need thereof, for example, by administering a therapeutic agent (e.g., an oligonucleotide herein such as a RNAi oligonucletoide) to the subject, for purposes of improving the health and/or well-being of the subject with respect to an existing condition (e.g., a disease, disorder) or to prevent or decrease the likelihood of the occurrence of a condition. In some embodiments, treatment involves reducing the frequency or severity of at least one sign, symptom, or contributing factor of a condition (e.g., disease, disorder) experienced by the subject.

### EXAMPLES

### Example 1: Preparation of RNAi Oligonucleotides

### Oligonucleotide Synthesis and Purification

[1170] The oligonucleotides (i.e., RNAi oligonucleotides) described in the foregoing Examples are chemically synthesized using methods described herein. Generally, RNAi oligonucleotides are synthesized using solid phase oligonucleotide synthesis methods as described for 19-23mer siRNAs (see, e.g., Scaringe et al. (1990)Nucleic Acids Res. 18:5433-5441 and Usman et al. (1987) J. Am. Chem. Soc. 109:7845-45; see also, U.S. Pat. Nos. 5,804,683; 5,831,071; 5,998,203; 6,008,400; 6,111,086; 6,117,657; 6,353,098; 6,362,323; 6,437,117 and 6,469,158) in addition to using known phosphoramidite synthesis (see, e.g., Hughes & Ellington (2017) Cold Spring Harb Perspect Biol. 9(1):a023812; Beaucage & Caruthers (1981) Tetrahedron Lett. 22:1859-62). dsRNAi oligonucleotides with a 19mer core sequence were formatted into constructs having a 25mer sense strand and a 27mer antisense strand to allow for processing by the RNAi machinery. The 19mer core sequence is complementary to a region in the SNCA mRNA.

[1171] Individual RNA strands were synthesized and HPLC purified according to standard methods (Integrated DNA Technologies; Coralville, IA). For example, RNA oligonucleotides were synthesized using solid phase phosphoramidite chemistry, deprotected, and desalted on NAP-5 columns (Amersham Pharmacia Biotech; Piscataway, NJ) using standard techniques (Damha & Olgivie (1993) Methods Mol. Biol. 20:81-114; Wincott et al. (1995) Nucleic Acids Res. 23:2677-84). The oligomers were purified using ion-exchange high performance liquid chromatography (IE-HPLC) on an Amersham Source 15Q column (1.0 cm×25 cm; Amersham Pharmacia Biotech) using a 15 min step-linear gradient. The gradient varied from 90:10 Buffers A:B to 52:48 Buffers A:B, where Buffer A is 100 mM Tris pH 8.5 and Buffer B is 100 mM Tris pH 8.5, 1 M NaCl. Samples were monitored at 260 nm, and peaks corresponding to the full-length oligonucleotide species were collected, pooled, desalted on NAP-5 columns, and lyophilized.

[1172] The purity of each oligomer was determined by capillary electrophoresis (CE) on a Beckman PACE 5000 (Beckman Coulter, Inc.; Fullerton, CA). The CE capillaries have a 100 μm inner diameter and contain ssDNA 100R Gel (Beckman-Coulter). Typically, about 0.6 nmole of oligonucleotide was injected into a capillary, run in an electric field of 444 V/cm, and detected by UV absorbance at 260 nm. Denaturing Tris-Borate-7 M-urea running buffer was purchased from Beckman-Coulter. Oligoribonucleotides were obtained that were at least 90% pure as assessed by CE for use in experiments described below. Compound identity was verified by matrix-assisted laser desorption ionization time-of-flight (MALDI-TOF) mass spectroscopy on a Voyager DE™ Biospectometry Work Station (Applied Biosystems; Foster City, CA) following the manufacturer's recommended protocol. Relative molecular masses of all oligomers were obtained, often within 0.2% of expected molecular mass.

### Preparation of Duplexes

[1173] ss RNA oligomers were resuspended (e.g., at 100 μM concentration) in duplex buffer consisting of 100 mM potassium acetate, 30 mM HEPES, pH 7.5. Complementary sense and antisense strands were mixed in equal molar amounts to yield a final solution of, for example, 50 μM duplex. Samples were heated to 100° C. for 5 min in RNA buffer (IDT) and were allowed to cool to room temperature before use. The RNAi oligonucleotides were stored at −20° C. ss RNA oligomers were stored lyophilized or in nuclease-free water at −80° C.

### Example 2: Generation of SNCA-Targeting RNAi Oligonucleotides

[1174] SNCA encodes SNCA, a neuronal protein that inhibits phospholipase D2. SNCA participates in the regulation of synaptic vesicle trafficking and neurotransmitter release. Abnormal expression of SNCA can lead to various diseases of the brain, including but not limited to Parkinson disease and multiple system atrophy. Oligonucleotides capable of inhibiting SNCA mRNA expression were identified and generated.

Identification of SNCA mRNA Target Sequences To generate SNCA-targeting RNAi oligonucleotides, a computer-based algorithm was used to computationally identify SNCA mRNA target sequences suitable for assaying inhibition of SNCA expression by the RNAi pathway. The algorithm provided RNAi oligonucleotide antisense strand sequences each having a region of complementarity to a suitable SNCA mRNA target sequence of human (Hs) or murine (Mm) mRNA (e.g., SEQ ID NOs: 1677 and 1678, respectively; Table 1). Due to sequence conservation across species, some of the SNCA mRNA target sequences identified for human SNCA mRNA are homologous to the corresponding SNCA mRNA target sequence of murine (mM) SNCA mRNA (SEQ ID NO: 1678; Table 1; i.e., double-common) and/or monkey (Mf) SNCA mRNA (SEQ ID NO: 1679; Table 1; i.e., triple-common). SNCA-targeting RNAi oligonucleotides comprising a region of complementarity to homologous SNCA mRNA target sequences with nucleotide sequence similarity are predicted to have the ability to target homologous SNCA mRNAs (e.g., human SNCA and monkey SNCA mRNAs).

TABLE 1
Exemplary Human SNCA, Monkey SNCA,
and Mouse SNCA mRNA Sequences.

| Species | GenBank Ref Seq # | SEQ ID NO |
|---|---|---|
| Human (Hs) | NM_00345.3 | 1677 |
| Mouse (Mm) | NM_001042451.2 | 1678 |
| Cynomolgus monkey (Mf) | XM_005555420.2 | 1679 |

[1175] RNAi oligonucleotides (formatted as DsiRNA oligonucleotides) were generated as described in Example 1 for evaluation in vitro. Each DsiRNA was generated with the same modification pattern, and each with a unique guide strand having a region of complementarity to a SNCA target sequence identified by the algorithm. Modifications for the sense and anti-sense DsiRNA included the following (X—any nucleotide; m—2′-OMe modified nucleotide; r—ribosyl modified nucleotide):

Sense Strand:
5′ rXmXrXmXrXrXrXrXrXrXrXrXrXmXr
XmXrXrXrXrXrXrXrXXX 3′
Anti-sense Strand:
3′ mXmXmXrXmXrXrXrXrXrXrXrXrXr
XmXrXmXrXrXrXrXrXrXmXmXmXmX 5′

### In Vitro Cell-Based Assays

[1176] The ability of each of the modified DsiRNA in Table 2 to reduce SNCA mRNA was measured using in vitro cell-based assays. Briefly, human Huh7 cells (hepatocyte cell line) expressing endogenous human SNCA were transfected with each of the DsiRNAs listed in Table 2 at 0.5 nM (Phase 1) or select DsiRNAs at 0.5 nM, 0.1 nM, and 0.02 nM (Phase 2) in separate wells of a multi-well cell-culture plate. Cells were maintained for 24 hours following transfection with the modified DsiRNA, and then the amount of remaining SNCA mRNA from the transfected cells was determined using a TAQMAN®-based qPCR assay using the following primers: Forward: AGG GTG TTC TCT ATG TAG GCT (SEQ ID NO: 2451); Reverse: ACT GCT CCT CCA ACA TTT GTC (SEQ ID NO: 2452); Probe: TGCTCTTTG/ZEN/GTCTTCTCAGCCACTG (SEQ ID NO:2453). Primer pairs were assayed for % remaining mRNA as shown in Table 2. DsiRNAs resulting in less than or equal to 13% SNCA mRNA remaining in DsiRNA-transfected cells when compared to mock-transfected cells were considered DsiRNA “hits”. The Huh7 cell-based assay evaluating the ability of the DsiRNAs listed in Table 2 to inhibit SNCA gene expression identified several candidate DsiRNAs.

[1177] Taken together, these results show that DsiRNAs designed to target human SNCA mRNA inhibit SNCA gene expression in cells, as determined by a reduced amount of SNCA mRNA in DsiRNA-transfected cells relative to control cells. These results demonstrate that the nucleotide sequences comprising the DsiRNA are useful for generating RNAi oligonucleotides to inhibit SNCA gene expression. Further, these results demonstrate that multiple SNCA mRNA target sequences are suitable for the RNAi-mediated inhibition of SNCA gene expression.

TABLE 2
In Vitro Screening Results.

| | | Anti-- | | | | | | | | |
|---|---|---|---|---|---|---|---|---|---|---|
| | Sense | sense | 0.5 nM | | 0.5 nM | | 0.1 nM | | 0.02 nM | |
| | strand | strand | (Phase 1) | | (Phase 2) | | (Phase 2) | | (Phase 2) | |
| | SEQ | SEQ | % | | % | | % | | % | |
| Construct | ID NO | ID NO | remaining | SEM | remaining | SEM | remaining | SEM | remaining | SEM |
| SNCA- | 1 | 385 | 21.028 | 7.767 | | | | | | |
| 259 | | | | | | | | | | |
| SNCA- | 2 | 386 | 10.924 | 7.093 | 37.112 | 5.627 | 28.096 | 8.714 | 79.81 | 7.104 |
| 260 | | | | | | | | | | |
| SNCA- | 3 | 387 | 35.842 | 15.053 | | | | | | |
| 261 | | | | | | | | | | |
| SNCA- | 4 | 388 | 17.541 | 8.957 | | | | | | |
| 262 | | | | | | | | | | |
| SNCA- | 5 | 389 | 17.382 | 10.863 | | | | | | |
| 263 | | | | | | | | | | |
| SNCA- | 6 | 390 | 36.491 | 18.92 | | | | | | |
| 264 | | | | | | | | | | |
| SNCA- | 7 | 391 | 49.492 | 26.24 | | | | | | |
| 285 | | | | | | | | | | |
| SNCA- | 8 | 392 | 49.592 | 19.43 | | | | | | |
| 288 | | | | | | | | | | |
| SNCA- | 9 | 393 | 8.115 | 3.208 | 43.444 | 7.701 | 27.964 | 8.808 | 81.547 | 10.004 |
| 289 | | | | | | | | | | |
| SNCA- | 10 | 394 | 38.872 | 10.445 | | | | | | |
| 290 | | | | | | | | | | |
| SNCA- | 11 | 395 | 29.695 | 7.526 | | | | | | |
| 292 | | | | | | | | | | |
| SNCA- | 12 | 396 | 9.825 | 4.634 | 22.757 | 4.4 | 36.61 | 7.78 | 58.649 | 13.758 |
| 293 | | | | | | | | | | |
| SNCA- | 13 | 397 | 13.107 | 4.749 | 37.536 | 4.852 | 30.59 | 3.325 | 52.451 | 6.372 |
| 294 | | | | | | | | | | |
| SNCA- | 14 | 398 | 33.409 | 9.494 | | | | | | |
| 295 | | | | | | | | | | |
| SNCA- | 15 | 399 | 16.99 | 5.748 | | | | | | |
| 296 | | | | | | | | | | |
| SNCA- | 16 | 400 | 40.332 | 10.053 | | | | | | |
| 297 | | | | | | | | | | |
| SNCA- | 17 | 401 | 18.159 | 2.562 | | | | | | |
| 407 | | | | | | | | | | |
| SNCA- | 18 | 402 | 11.591 | 3.87 | 33.765 | 3.647 | 25.106 | 5.023 | 67.476 | 8.155 |
| 408 | | | | | | | | | | |
| SNCA- | 19 | 403 | 38.371 | 7.67 | | | | | | |
| 409 | | | | | | | | | | |
| SNCA- | 20 | 404 | 18.726 | 11.196 | | | | | | |
| 410 | | | | | | | | | | |
| SNCA- | 21 | 405 | 17.893 | 4.02 | | | | | | |
| 411 | | | | | | | | | | |
| SNCA- | 22 | 406 | 11.516 | 4.359 | 47.246 | 6.569 | 27.393 | 6.544 | 37.152 | 4.036 |
| 412 | | | | | | | | | | |
| SNCA- | 23 | 407 | 14.504 | 5.535 | | | | | | |
| 413 | | | | | | | | | | |
| SNCA- | 24 | 408 | 27.844 | 7.473 | | | | | | |
| 414 | | | | | | | | | | |
| SNCA- | 25 | 409 | 20.554 | 12.528 | | | | | | |
| 415 | | | | | | | | | | |
| SNCA- | 26 | 410 | 19.024 | 3.911 | | | | | | |
| 416 | | | | | | | | | | |
| SNCA- | 27 | 411 | 12.153 | 2.561 | 35.679 | 5.906 | 23.925 | 5.503 | 52.532 | 11.956 |
| 417 | | | | | | | | | | |
| SNCA- | 28 | 412 | 22.664 | 11.484 | | | | | | |
| 418 | | | | | | | | | | |
| SNCA- | 29 | 413 | 9.869 | 6.642 | 39.642 | 5.514 | 33.021 | 6.914 | 41.898 | 4.856 |
| 419 | | | | | | | | | | |
| SNCA- | 30 | 414 | 12.122 | 4.44 | 27.797 | 3.652 | 26.587 | 8.315 | 47.288 | 8.683 |
| 420 | | | | | | | | | | |
| SNCA- | 31 | 415 | 6.679 | 2.43 | 30.227 | 6.532 | 27.521 | 4.281 | 55.495 | 17.603 |
| 421 | | | | | | | | | | |
| SNCA- | 32 | 416 | 16.366 | 6.3 | | | | | | |
| 422 | | | | | | | | | | |
| SNCA- | 33 | 417 | 34.694 | 8.893 | | | | | | |
| 423 | | | | | | | | | | |
| SNCA- | 34 | 418 | 12.914 | 4.06 | 35.198 | 5.089 | 30.672 | 4.529 | 61.593 | 7.128 |
| 424 | | | | | | | | | | |
| SNCA- | 35 | 419 | 15.225 | 4.866 | | | | | | |
| 425 | | | | | | | | | | |
| SNCA- | 36 | 420 | 5.898 | 1.512 | 23.623 | 3.415 | 28.853 | 6.675 | 51.599 | 5.31 |
| 426 | | | | | | | | | | |
| SNCA- | 37 | 421 | 9.735 | 8.3 | 31.398 | 5.755 | 23.728 | 3.694 | 45.858 | 4.865 |
| 427 | | | | | | | | | | |
| SNCA- | 38 | 422 | 11.137 | 6.328 | 44.865 | 6.327 | 26.163 | 2.559 | 45.181 | 4.085 |
| 428 | | | | | | | | | | |
| SNCA- | 39 | 423 | 9.884 | 4.575 | 21.653 | 4.026 | 26.259 | 5.864 | 40.966 | 7.277 |
| 429 | | | | | | | | | | |
| SNCA- | 40 | 424 | 27.457 | 3.782 | | | | | | |
| 430 | | | | | | | | | | |
| SNCA- | 41 | 425 | 8.998 | 2.605 | 48.481 | 6.857 | 25.432 | 4.515 | 58.303 | 9.736 |
| 431 | | | | | | | | | | |
| SNCA- | 42 | 426 | 38.792 | 19.736 | | | | | | |
| 432 | | | | | | | | | | |
| SNCA- | 43 | 427 | 53.456 | 19.289 | | | | | | |
| 433 | | | | | | | | | | |
| SNCA- | 44 | 428 | 7.412 | 3.571 | 49.317 | 10.869 | 36.72 | 9.856 | 86.058 | 21.28 |
| 434 | | | | | | | | | | |
| SNCA- | 45 | 429 | 21.354 | 3.191 | | | | | | |
| 435 | | | | | | | | | | |
| SNCA- | 46 | 430 | 44.513 | 14.609 | | | | | | |
| 436 | | | | | | | | | | |
| SNCA- | 47 | 431 | 23.269 | 8.142 | | | | | | |
| 437 | | | | | | | | | | |
| SNCA- | 48 | 432 | 10.817 | 4.527 | 41.874 | 6.214 | 34.836 | 8.734 | 72.722 | 9.305 |
| 725 | | | | | | | | | | |
| SNCA- | 49 | 433 | 18.369 | 7.153 | | | | | | |
| 726 | | | | | | | | | | |
| SNCA- | 50 | 434 | 11.69 | 1.534 | 41.632 | 4.62 | 34.945 | 7.453 | 74.069 | 5.139 |
| 727 | | | | | | | | | | |
| SNCA- | 51 | 435 | 31.135 | 7.334 | | | | | | |
| 728 | | | | | | | | | | |
| SNCA- | 52 | 436 | 16.565 | 3.422 | | | | | | |
| 729 | | | | | | | | | | |
| SNCA- | 53 | 437 | 11.618 | 2.771 | 34.963 | 7.849 | 17.192 | 3.216 | 34.475 | 2.241 |
| 730 | | | | | | | | | | |
| SNCA- | 54 | 438 | 11.056 | 4.648 | 35.328 | 4.627 | 40.424 | 5.885 | 67.647 | 15.711 |
| 731 | | | | | | | | | | |
| SNCA- | 55 | 439 | 75.461 | 17.42 | | | | | | |
| 732 | | | | | | | | | | |
| SNCA- | 56 | 440 | 14.148 | 2.791 | | | | | | |
| 733 | | | | | | | | | | |
| SNCA- | 57 | 441 | 11.7 | 4.222 | 35.111 | 5.164 | 27.312 | 6.438 | 45.112 | 8.846 |
| 734 | | | | | | | | | | |
| SNCA- | 58 | 442 | 18.872 | 2.553 | | | | | | |
| 735 | | | | | | | | | | |
| SNCA- | 59 | 443 | 58.586 | 17.766 | | | | | | |
| 736 | | | | | | | | | | |
| SNCA- | 60 | 444 | 6.272 | 1.395 | 39.086 | 9.636 | 34.317 | 6.674 | 73.497 | 6.148 |
| 737 | | | | | | | | | | |
| SNCA- | 61 | 445 | 11.747 | 2.406 | 54.583 | 10.289 | 38.467 | 3.934 | 74.344 | 5.756 |
| 738 | | | | | | | | | | |
| SNCA- | 62 | 446 | 10.99 | 3.496 | 18.361 | 4.756 | 39.08 | 3.562 | 54.152 | 8.21 |
| 739 | | | | | | | | | | |
| SNCA- | 63 | 447 | 69.35 | 19.817 | | | | | | |
| 740 | | | | | | | | | | |
| SNCA- | 64 | 448 | 8.737 | 4.305 | 19.377 | 4.552 | 66.725 | 5.334 | 79.724 | 9.112 |
| 741 | | | | | | | | | | |
| SNCA- | 65 | 449 | 8.433 | 3.552 | 33.441 | 4.868 | 30.56 | 7.944 | 70.617 | 4.772 |
| 742 | | | | | | | | | | |
| SNCA- | 66 | 450 | 16.941 | 4.739 | | | | | | |
| 790 | | | | | | | | | | |
| SNCA- | 67 | 451 | 20.25 | 4.265 | | | | | | |
| 791 | | | | | | | | | | |
| SNCA- | 68 | 452 | 16.986 | 3.945 | | | | | | |
| 792 | | | | | | | | | | |
| SNCA- | 69 | 453 | 22.982 | 7.151 | | | | | | |
| 938 | | | | | | | | | | |
| SNCA- | 70 | 454 | 29.625 | 8.316 | | | | | | |
| 939 | | | | | | | | | | |
| SNCA- | 71 | 455 | 77.834 | 23.621 | | | | | | |
| 940 | | | | | | | | | | |
| SNCA- | 72 | 456 | 16.428 | 5.414 | | | | | | |
| 941 | | | | | | | | | | |
| SNCA- | 73 | 457 | 16.912 | 4.906 | | | | | | |
| 942 | | | | | | | | | | |
| SNCA- | 74 | 458 | 24.415 | 5.263 | | | | | | |
| 943 | | | | | | | | | | |
| SNCA- | 75 | 459 | 20.981 | 5.464 | | | | | | |
| 944 | | | | | | | | | | |
| SNCA- | 76 | 460 | 20.003 | 5.712 | | | | | | |
| 945 | | | | | | | | | | |
| SNCA- | 77 | 461 | 20.9 | 2.949 | | | | | | |
| 946 | | | | | | | | | | |
| SNCA- | 78 | 462 | 18.256 | 4.331 | | | | | | |
| 947 | | | | | | | | | | |
| SNCA- | 79 | 463 | 17.407 | 3.425 | | | | | | |
| 948 | | | | | | | | | | |
| SNCA- | 80 | 464 | 26.9 | 7.839 | | | | | | |
| 949 | | | | | | | | | | |
| SNCA- | 81 | 465 | 15.38 | 4.999 | | | | | | |
| 950 | | | | | | | | | | |
| SNCA- | 82 | 466 | 10.579 | 2.195 | 25.725 | 5.871 | 29.644 | 8.857 | 66.912 | 13.379 |
| 951 | | | | | | | | | | |
| SNCA- | 83 | 467 | 12.643 | 5.775 | 36.383 | 5.003 | 32.949 | 5.078 | 46.625 | 9.677 |
| 952 | | | | | | | | | | |
| SNCA- | 84 | 468 | 20.445 | 6.132 | | | | | | |
| 953 | | | | | | | | | | |
| SNCA- | 85 | 469 | 19.377 | 6.269 | | | | | | |
| 954 | | | | | | | | | | |
| SNCA- | 86 | 470 | 16.369 | 9.735 | | | | | | |
| 1081 | | | | | | | | | | |
| SNCA- | 87 | 471 | 42.726 | 19.415 | | | | | | |
| 1082 | | | | | | | | | | |
| SNCA- | 88 | 472 | 18.413 | 5.398 | | | | | | |
| 1083 | | | | | | | | | | |
| SNCA- | 89 | 473 | 26.872 | 8.226 | | | | | | |
| 1084 | | | | | | | | | | |
| SNCA- | 90 | 474 | 32.544 | 11.55 | | | | | | |
| 1085 | | | | | | | | | | |
| SNCA- | 91 | 475 | 34.434 | 8.376 | | | | | | |
| 1188 | | | | | | | | | | |
| SNCA- | 92 | 476 | 33.597 | 10.639 | | | | | | |
| 1189 | | | | | | | | | | |
| SNCA- | 93 | 477 | 36.212 | 5.277 | | | | | | |
| 1190 | | | | | | | | | | |
| SNCA- | 94 | 478 | 54.982 | 16.216 | | | | | | |
| 1191 | | | | | | | | | | |
| SNCA- | 95 | 479 | 36.96 | 6.856 | | | | | | |
| 1192 | | | | | | | | | | |
| SNCA- | 96 | 480 | 52.029 | 24.55 | | | | | | |
| 1193 | | | | | | | | | | |
| SNCA- | 97 | 481 | 14.347 | 3.229 | | | | | | |
| 225 | | | | | | | | | | |
| SNCA- | 98 | 482 | 19.268 | 7.984 | | | | | | |
| 226 | | | | | | | | | | |
| SNCA- | 99 | 483 | 4.787 | 1.383 | 41.587 | 8.038 | 35.936 | 6.086 | 42.385 | 9.759 |
| 227 | | | | | | | | | | |
| SNCA- | 100 | 484 | 6.165 | 2.191 | 28.468 | 3.963 | 40.682 | 11.345 | 66.497 | 15.786 |
| 228 | | | | | | | | | | |
| SNCA- | 101 | 485 | 9.606 | 4.668 | 24.686 | 4.171 | 41.949 | 4.391 | 74.199 | 20.715 |
| 229 | | | | | | | | | | |
| SNCA- | 102 | 486 | 10.137 | 1.818 | 13.832 | 3.756 | 25.986 | 5.879 | 39.103 | 7.664 |
| 230 | | | | | | | | | | |
| SNCA- | 103 | 487 | 9.529 | 3.888 | 32.71 | 4.003 | 35.013 | 9.465 | 55.227 | 5.636 |
| 231 | | | | | | | | | | |
| SNCA- | 104 | 488 | 17.066 | 7.008 | | | | | | |
| 232 | | | | | | | | | | |
| SNCA- | 105 | 489 | 20.06 | 7.991 | | | | | | |
| 233 | | | | | | | | | | |
| SNCA- | 106 | 490 | 21.677 | 5.799 | | | | | | |
| 234 | | | | | | | | | | |
| SNCA- | 107 | 491 | 26.294 | 10.298 | | | | | | |
| 235 | | | | | | | | | | |
| SNCA- | 108 | 492 | 19.996 | 9.8 | | | | | | |
| 236 | | | | | | | | | | |
| SNCA- | 109 | 493 | 7.984 | 10.599 | 22.528 | 4.807 | 40.783 | 7.847 | 65.34 | 12.841 |
| 237 | | | | | | | | | | |
| SNCA- | 110 | 494 | 11.813 | 4.894 | 16.115 | 3.206 | 29.219 | 8.812 | 74.975 | 10.255 |
| 238 | | | | | | | | | | |
| SNCA- | 111 | 495 | 11.508 | 7.719 | 33.154 | 3.975 | 47.627 | 7.067 | 67.706 | 17.831 |
| 239 | | | | | | | | | | |
| SNCA- | 112 | 496 | 13.53 | 4.889 | | | | | | |
| 240 | | | | | | | | | | |
| SNCA- | 113 | 497 | 19.899 | 6.874 | | | | | | |
| 241 | | | | | | | | | | |
| SNCA- | 114 | 498 | 5.83 | 5.69 | 29.958 | 7.055 | 32.098 | 8.11 | 63.262 | 14.749 |
| 242 | | | | | | | | | | |
| SNCA- | 115 | 499 | 15.544 | 3.721 | | | | | | |
| 243 | | | | | | | | | | |
| SNCA- | 116 | 500 | 4.34 | 2.369 | 21.584 | 4.329 | 24.849 | 8.061 | 81.412 | 11.388 |
| 244 | | | | | | | | | | |
| SNCA- | 117 | 501 | 18.764 | 6.481 | | | | | | |
| 245 | | | | | | | | | | |
| SNCA- | 118 | 502 | 23.857 | 4.59 | | | | | | |
| 246 | | | | | | | | | | |
| SNCA- | 119 | 503 | 15.174 | 9.291 | | | | | | |
| 247 | | | | | | | | | | |
| SNCA- | 120 | 504 | 5.441 | 1.321 | 20.623 | 2.402 | 44.023 | 7.469 | 77.315 | 11.73 |
| 248 | | | | | | | | | | |
| SNCA- | 121 | 505 | 14.374 | 7.944 | | | | | | |
| 249 | | | | | | | | | | |
| SNCA- | 122 | 506 | 8.485 | 2.956 | 14.209 | 3.152 | 22.153 | 5.705 | 35.813 | 8.053 |
| 250 | | | | | | | | | | |
| SNCA- | 123 | 507 | 9.309 | 2.574 | 21.192 | 5.49 | 39.388 | 9.439 | 54.495 | 9.357 |
| 251 | | | | | | | | | | |
| SNCA- | 124 | 508 | 16.638 | 3.288 | | | | | | |
| 252 | | | | | | | | | | |
| SNCA- | 125 | 509 | 13.298 | 2.511 | | | | | | |
| 253 | | | | | | | | | | |
| SNCA- | 126 | 510 | 5.654 | 2.676 | 20.119 | 2.655 | 21.843 | 4.688 | 53.619 | 7.441 |
| 254 | | | | | | | | | | |
| SNCA- | 127 | 511 | 28.53 | 6.232 | | | | | | |
| 256 | | | | | | | | | | |
| SNCA- | 128 | 512 | 11.724 | 4.488 | 20.966 | 3.786 | 21.548 | 4.295 | 58.124 | 11.871 |
| 330 | | | | | | | | | | |
| SNCA- | 129 | 513 | 37.001 | 26.374 | | | | | | |
| 335 | | | | | | | | | | |
| SNCA- | 130 | 514 | 15.67 | 7.738 | | | | | | |
| 337 | | | | | | | | | | |
| SNCA- | 131 | 515 | 23.437 | 9.387 | | | | | | |
| 341 | | | | | | | | | | |
| SNCA- | 132 | 516 | 6.432 | 2.063 | 22.627 | 4.443 | 27.249 | 7.378 | 51.84 | 11.789 |
| 342 | | | | | | | | | | |
| SNCA- | 133 | 517 | 10.679 | 5.402 | 23.343 | 3.606 | 33.233 | 4.542 | 67.616 | 8.864 |
| 344 | | | | | | | | | | |
| SNCA- | 134 | 518 | 38.719 | 11.091 | | | | | | |
| 345 | | | | | | | | | | |
| SNCA- | 135 | 519 | 4.932 | 4.037 | 23.27 | 4.284 | 27.573 | 4.187 | 66.702 | 7.826 |
| 351 | | | | | | | | | | |
| SNCA- | 136 | 520 | 8.895 | 2.611 | 26.016 | 5.32 | 32.58 | 6.87 | 51.731 | 8.723 |
| 353 | | | | | | | | | | |
| SNCA- | 137 | 521 | 11.07 | 6.637 | 26.4 | 2.109 | 24.228 | 4.719 | 45.598 | 6.927 |
| 355 | | | | | | | | | | |
| SNCA- | 138 | 522 | 10.32 | 3.591 | 30.861 | 4.875 | 43.199 | 7.525 | 55.085 | 9.655 |
| 638 | | | | | | | | | | |
| SNCA- | 139 | 523 | 14.388 | 9.708 | | | | | | |
| 641 | | | | | | | | | | |
| SNCA- | 140 | 524 | 9.499 | 4.637 | 18.555 | 3.579 | 28.094 | 4.526 | 48.625 | 7.33 |
| 642 | | | | | | | | | | |
| SNCA- | 141 | 525 | 19.686 | 8.814 | | | | | | |
| 647 | | | | | | | | | | |
| SNCA- | 142 | 526 | 16.775 | 6.624 | | | | | | |
| 648 | | | | | | | | | | |
| SNCA- | 143 | 527 | 17.623 | 3.844 | | | | | | |
| 650 | | | | | | | | | | |
| SNCA- | 144 | 528 | 19.589 | 4.808 | | | | | | |
| 652 | | | | | | | | | | |
| SNCA- | 145 | 529 | 19.395 | 7.726 | | | | | | |
| 653 | | | | | | | | | | |
| SNCA- | 146 | 530 | 16.734 | 8.572 | | | | | | |
| 654 | | | | | | | | | | |
| SNCA- | 147 | 531 | 12.377 | 6.682 | 41.918 | 10.66 | 48.746 | 8.211 | 57.445 | 10.006 |
| 656 | | | | | | | | | | |
| SNCA- | 148 | 532 | 7.019 | 2.637 | 46.196 | 7.494 | 36.925 | 6.859 | 30.886 | 5.127 |
| 657 | | | | | | | | | | |
| SNCA- | 149 | 533 | 21.058 | 12.569 | | | | | | |
| 659 | | | | | | | | | | |
| SNCA- | 150 | 534 | 16.745 | 7.314 | | | | | | |
| 660 | | | | | | | | | | |
| SNCA- | 151 | 535 | 45.235 | 11.77 | | | | | | |
| 661 | | | | | | | | | | |
| SNCA- | 152 | 536 | 80.539 | 22.395 | | | | | | |
| 662 | | | | | | | | | | |
| SNCA- | 153 | 537 | 21.728 | 11.526 | | | | | | |
| 663 | | | | | | | | | | |
| SNCA- | 154 | 538 | 14.729 | 3.379 | | | | | | |
| 668 | | | | | | | | | | |
| SNCA- | 155 | 539 | 13.525 | 4.882 | | | | | | |
| 669 | | | | | | | | | | |
| SNCA- | 156 | 540 | 19.661 | 7.793 | | | | | | |
| 672 | | | | | | | | | | |
| SNCA- | 157 | 541 | 6.27 | 2.424 | 33.096 | 6.913 | 23.4 | 3.202 | 39.723 | 8.089 |
| 675 | | | | | | | | | | |
| SNCA- | 158 | 542 | 11.339 | 4.109 | 19.649 | 4.311 | 25.257 | 3.504 | 52.186 | 9.605 |
| 676 | | | | | | | | | | |
| SNCA- | 159 | 543 | 17.236 | 4.674 | | | | | | |
| 689 | | | | | | | | | | |
| SNCA- | 160 | 544 | 15.301 | 3.793 | | | | | | |
| 724 | | | | | | | | | | |
| SNCA- | 161 | 545 | 25.371 | 12.622 | | | | | | |
| 744 | | | | | | | | | | |
| SNCA- | 162 | 546 | 22.027 | 7.134 | | | | | | |
| 745 | | | | | | | | | | |
| SNCA- | 163 | 547 | 16.917 | 3.299 | | | | | | |
| 746 | | | | | | | | | | |
| SNCA- | 164 | 548 | 7.046 | 4.365 | 21.584 | 4.247 | 24.528 | 5.148 | 55.641 | 7.8 |
| 751 | | | | | | | | | | |
| SNCA- | 165 | 549 | 8.962 | 4.066 | 14.127 | 2.79 | 21.293 | 4.657 | 26.359 | 5.246 |
| 752 | | | | | | | | | | |
| SNCA- | 166 | 550 | 13.116 | 4.566 | 32.4 | 4.996 | 32.551 | 9.586 | 46.198 | 9.593 |
| 753 | | | | | | | | | | |
| SNCA- | 167 | 551 | 10.092 | 6.201 | 21.078 | 4.407 | 37.065 | 4.481 | 41.618 | 8.725 |
| 754 | | | | | | | | | | |
| SNCA- | 168 | 552 | 10.167 | 3.77 | 34.641 | 5.11 | 33.916 | 6.369 | 42.694 | 4.827 |
| 755 | | | | | | | | | | |
| SNCA- | 169 | 553 | 12.669 | 10.7 | 24.246 | 5.182 | 49.091 | 10.258 | 58.13 | 5.742 |
| 756 | | | | | | | | | | |
| SNCA- | 170 | 554 | 7.776 | 3.982 | 21.017 | 3.596 | 27.818 | 4.273 | 42.151 | 7.169 |
| 757 | | | | | | | | | | |
| SNCA- | 171 | 555 | 46.122 | 14.665 | | | | | | |
| 758 | | | | | | | | | | |
| SNCA- | 172 | 556 | 88.569 | 15.714 | | | | | | |
| 759 | | | | | | | | | | |
| SNCA- | 173 | 557 | 11.23 | 4.522 | 22.47 | 3.604 | 21.289 | 4.481 | 41.864 | 3.488 |
| 760 | | | | | | | | | | |
| SNCA- | 174 | 558 | 14.274 | 5.024 | | | | | | |
| 761 | | | | | | | | | | |
| SNCA- | 175 | 559 | 13.223 | 6.405 | | | | | | |
| 762 | | | | | | | | | | |
| SNCA- | 176 | 560 | 36.561 | 7.308 | | | | | | |
| 789 | | | | | | | | | | |
| SNCA- | 177 | 561 | 17.339 | 4.453 | | | | | | |
| 795 | | | | | | | | | | |
| SNCA- | 178 | 562 | 14.282 | 8.129 | | | | | | |
| 796 | | | | | | | | | | |
| SNCA- | 179 | 563 | 17.559 | 5.909 | | | | | | |
| 797 | | | | | | | | | | |
| SNCA- | 180 | 564 | 20.326 | 9.797 | | | | | | |
| 798 | | | | | | | | | | |
| SNCA- | 181 | 565 | 9.776 | 3.404 | 25.468 | 6.855 | 35.649 | 5.913 | 73.684 | 11.933 |
| 799 | | | | | | | | | | |
| SNCA- | 182 | 566 | 12.828 | 3.795 | 21.022 | 4.795 | 21.187 | 2.88 | 27.413 | 4.036 |
| 800 | | | | | | | | | | |
| SNCA- | 183 | 567 | 6.113 | 5.646 | 26.92 | 8.222 | 31.387 | 6.463 | 49.773 | 5.712 |
| 801 | | | | | | | | | | |
| SNCA- | 184 | 568 | 11.053 | 2.081 | 20.612 | 4.001 | 29.139 | 5.267 | 40.539 | 4.129 |
| 802 | | | | | | | | | | |
| SNCA- | 185 | 569 | 22.76 | 12.542 | | | | | | |
| 803 | | | | | | | | | | |
| SNCA- | 186 | 570 | 20.403 | 7.537 | | | | | | |
| 804 | | | | | | | | | | |
| SNCA- | 187 | 571 | 46.87 | 15.777 | | | | | | |
| 805 | | | | | | | | | | |
| SNCA- | 188 | 572 | 14.108 | 5.477 | | | | | | |
| 809 | | | | | | | | | | |
| SNCA- | 189 | 573 | 9.329 | 3.564 | 27.873 | 1.985 | 35.244 | 6.038 | 50.308 | 10.075 |
| 839 | | | | | | | | | | |
| SNCA- | 190 | 574 | 74.626 | 46.046 | | | | | | |
| 844 | | | | | | | | | | |
| SNCA- | 191 | 575 | 18.69 | 6.059 | | | | | | |
| 845 | | | | | | | | | | |
| SNCA- | 192 | 576 | 10.317 | 5.491 | 26.901 | 3.102 | 41.337 | 6.44 | 48.667 | 8.691 |
| 846 | | | | | | | | | | |
| SNCA- | 193 | 577 | 19.063 | 7.07 | | | | | | |
| 847 | | | | | | | | | | |
| SNCA- | 194 | 578 | 9.428 | 3.56 | 36.383 | 5.379 | 41.782 | 8.026 | 48.692 | 6.434 |
| 848 | | | | | | | | | | |
| SNCA- | 195 | 579 | 14.389 | 3.715 | | | | | | |
| 849 | | | | | | | | | | |
| SNCA- | 196 | 580 | 13.739 | 4.862 | | | | | | |
| 850 | | | | | | | | | | |
| SNCA- | 197 | 581 | 10.463 | 4.253 | 35.979 | 7.852 | 41.306 | 8.024 | 62.016 | 23.237 |
| 851 | | | | | | | | | | |
| SNCA- | 198 | 582 | 11.316 | 3.697 | 27.846 | 5.738 | 37.543 | 5.499 | 50.286 | 13.342 |
| 852 | | | | | | | | | | |
| SNCA- | 199 | 583 | 15.994 | 4.1 | | | | | | |
| 853 | | | | | | | | | | |
| SNCA- | 200 | 584 | 9.202 | 2.258 | 30.711 | 6.059 | 25.599 | 4.353 | 55.565 | 15.174 |
| 854 | | | | | | | | | | |
| SNCA- | 201 | 585 | 20.573 | 10.841 | | | | | | |
| 855 | | | | | | | | | | |
| SNCA- | 202 | 586 | 14.776 | 8.048 | | | | | | |
| 856 | | | | | | | | | | |
| SNCA- | 203 | 587 | 15.183 | 2.258 | | | | | | |
| 857 | | | | | | | | | | |
| SNCA- | 204 | 588 | 25.315 | 5.923 | | | | | | |
| 858 | | | | | | | | | | |
| SNCA- | 205 | 589 | 13.239 | 4.322 | | | | | | |
| 859 | | | | | | | | | | |
| SNCA- | 206 | 590 | 14.615 | 5.194 | | | | | | |
| 860 | | | | | | | | | | |
| SNCA- | 207 | 591 | 21.488 | 4.128 | | | | | | |
| 861 | | | | | | | | | | |
| SNCA- | 208 | 592 | 18.045 | 3.597 | | | | | | |
| 863 | | | | | | | | | | |
| SNCA- | 209 | 593 | 17.14 | 4.532 | | | | | | |
| 864 | | | | | | | | | | |
| SNCA- | 210 | 594 | 46.184 | 11.994 | | | | | | |
| 865 | | | | | | | | | | |
| SNCA- | 211 | 595 | 23.013 | 4.494 | | | | | | |
| 867 | | | | | | | | | | |
| SNCA- | 212 | 596 | 13.434 | 5.696 | | | | | | |
| 868 | | | | | | | | | | |
| SNCA- | 213 | 597 | 40.79 | 10.131 | | | | | | |
| 875 | | | | | | | | | | |
| SNCA- | 214 | 598 | 16.108 | 4.34 | | | | | | |
| 881 | | | | | | | | | | |
| SNCA- | 215 | 599 | 20.237 | 4.316 | | | | | | |
| 883 | | | | | | | | | | |
| SNCA- | 216 | 600 | 23.853 | 6.207 | | | | | | |
| 889 | | | | | | | | | | |
| SNCA- | 217 | 601 | 22.243 | 9.121 | | | | | | |
| 890 | | | | | | | | | | |
| SNCA- | 218 | 602 | 9.251 | 2.909 | 27.694 | 4.477 | 31.71 | 11.159 | 57.055 | 14.154 |
| 891 | | | | | | | | | | |
| SNCA- | 219 | 603 | 7.919 | 3.423 | 27.469 | 3.712 | 22.038 | 5.285 | 39.552 | 7.131 |
| 892 | | | | | | | | | | |
| SNCA- | 220 | 604 | 10.274 | 3.153 | 27.735 | 3.133 | 20.78 | 2.389 | 43.233 | 11.771 |
| 893 | | | | | | | | | | |
| SNCA- | 221 | 605 | 12.18 | 2.415 | 29.449 | 2.382 | 27.927 | 4.718 | 37.986 | 6.528 |
| 894 | | | | | | | | | | |
| SNCA- | 222 | 606 | 11.2 | 5.219 | 57.268 | 8.688 | 22.85 | 2.979 | 58.137 | 13.395 |
| 895 | | | | | | | | | | |
| SNCA- | 223 | 607 | 12.904 | 3.536 | 29.601 | 6.084 | 18.668 | 3.682 | 42.864 | 12.918 |
| 897 | | | | | | | | | | |
| SNCA- | 224 | 608 | 19.485 | 6.082 | | | | | | |
| 898 | | | | | | | | | | |
| SNCA- | 225 | 609 | 20.537 | 7.854 | | | | | | |
| 900 | | | | | | | | | | |
| SNCA- | 226 | 610 | 11.492 | 3.831 | 38.196 | 7.236 | 30.775 | 6.084 | 30.583 | 8.291 |
| 901 | | | | | | | | | | |
| SNCA- | 227 | 611 | 13.887 | 3.36 | | | | | | |
| 956 | | | | | | | | | | |
| SNCA- | 228 | 612 | 15.814 | 5.095 | | | | | | |
| 957 | | | | | | | | | | |
| SNCA- | 229 | 613 | 23.912 | 4.441 | | | | | | |
| 958 | | | | | | | | | | |
| SNCA- | 230 | 614 | 14.942 | 4.781 | | | | | | |
| 959 | | | | | | | | | | |
| SNCA- | 231 | 615 | 16.496 | 7.433 | | | | | | |
| 961 | | | | | | | | | | |
| SNCA- | 232 | 616 | 21.007 | 6.266 | | | | | | |
| 962 | | | | | | | | | | |
| SNCA- | 233 | 617 | 39.092 | 2.915 | | | | | | |
| 963 | | | | | | | | | | |
| SNCA- | 234 | 618 | 16.443 | 7.239 | | | | | | |
| 964 | | | | | | | | | | |
| SNCA- | 235 | 619 | 24.775 | 8.528 | | | | | | |
| 965 | | | | | | | | | | |
| SNCA- | 236 | 620 | 12.893 | 5.171 | 38.54 | 5.561 | 25.903 | 7.249 | 44.895 | 9.781 |
| 966 | | | | | | | | | | |
| SNCA- | 237 | 621 | 14.291 | 3.583 | | | | | | |
| 967 | | | | | | | | | | |
| SNCA- | 238 | 622 | 20.484 | 7.418 | | | | | | |
| 968 | | | | | | | | | | |
| SNCA- | 239 | 623 | 30.042 | 9.705 | | | | | | |
| 969 | | | | | | | | | | |
| SNCA- | 240 | 624 | 30.704 | 9.914 | | | | | | |
| 970 | | | | | | | | | | |
| SNCA- | 241 | 625 | 16.061 | 3.327 | | | | | | |
| 971 | | | | | | | | | | |
| SNCA- | 242 | 626 | 29.952 | 6.161 | | | | | | |
| 972 | | | | | | | | | | |
| SNCA- | 243 | 627 | 22.638 | 6.961 | | | | | | |
| 973 | | | | | | | | | | |
| SNCA- | 244 | 628 | 13.472 | 2.265 | | | | | | |
| 974 | | | | | | | | | | |
| SNCA- | 245 | 629 | 16.262 | 4.2 | | | | | | |
| 975 | | | | | | | | | | |
| SNCA- | 246 | 630 | 12.646 | 2.818 | 51.087 | 4.763 | 37.57 | 14.498 | 35.082 | 7.703 |
| 976 | | | | | | | | | | |
| SNCA- | 247 | 631 | 14.825 | 3.605 | | | | | | |
| 977 | | | | | | | | | | |
| SNCA- | 248 | 632 | 14.93 | 3.02 | | | | | | |
| 978 | | | | | | | | | | |
| SNCA- | 249 | 633 | 22.697 | 4.896 | | | | | | |
| 979 | | | | | | | | | | |
| SNCA- | 250 | 634 | 25.151 | 4.841 | | | | | | |
| 980 | | | | | | | | | | |
| SNCA- | 251 | 635 | 13.233 | 4.093 | | | | | | |
| 981 | | | | | | | | | | |
| SNCA- | 252 | 636 | 16.88 | 7.685 | | | | | | |
| 982 | | | | | | | | | | |
| SNCA- | 253 | 637 | 15.526 | 2.246 | | | | | | |
| 983 | | | | | | | | | | |
| SNCA- | 254 | 638 | 13.162 | 3.1 | | | | | | |
| 984 | | | | | | | | | | |
| SNCA- | 255 | 639 | 17.685 | 6.097 | | | | | | |
| 985 | | | | | | | | | | |
| SNCA- | 256 | 640 | 7.535 | 3.549 | 30.867 | 3.607 | 23.927 | 2.952 | 38.751 | 5.435 |
| 986 | | | | | | | | | | |
| SNCA- | 257 | 641 | 26.054 | 7.963 | | | | | | |
| 987 | | | | | | | | | | |
| SNCA- | 258 | 642 | 23.731 | 5.057 | | | | | | |
| 988 | | | | | | | | | | |
| SNCA- | 259 | 643 | 13.036 | 2.572 | 34.841 | 8.76 | 22.808 | 3.446 | 35.423 | 6.812 |
| 989 | | | | | | | | | | |
| SNCA- | 260 | 644 | 18.701 | 4.706 | | | | | | |
| 990 | | | | | | | | | | |
| SNCA- | 261 | 645 | 20.048 | 6.431 | | | | | | |
| 991 | | | | | | | | | | |
| SNCA- | 262 | 646 | 13.682 | 1.71 | | | | | | |
| 992 | | | | | | | | | | |
| SNCA- | 263 | 647 | 19.584 | 8.343 | | | | | | |
| 993 | | | | | | | | | | |
| SNCA- | 264 | 648 | 20.247 | 6.365 | | | | | | |
| 994 | | | | | | | | | | |
| SNCA- | 265 | 649 | 11.503 | 5.112 | 39.827 | 5.279 | 18.776 | 2.896 | 33.235 | 8.303 |
| 995 | | | | | | | | | | |
| SNCA- | 266 | 650 | 15.688 | 7.789 | | | | | | |
| 996 | | | | | | | | | | |
| SNCA- | 267 | 651 | 28.605 | 9.062 | | | | | | |
| 997 | | | | | | | | | | |
| SNCA- | 268 | 652 | 14.155 | 5.759 | | | | | | |
| 998 | | | | | | | | | | |
| SNCA- | 269 | 653 | 19.154 | 5.565 | | | | | | |
| 999 | | | | | | | | | | |
| SNCA- | 270 | 654 | 18.472 | 10.619 | | | | | | |
| 1000 | | | | | | | | | | |
| SNCA- | 271 | 655 | 21.593 | 5.895 | | | | | | |
| 1001 | | | | | | | | | | |
| SNCA- | 272 | 656 | 17.202 | 4.5 | | | | | | |
| 1002 | | | | | | | | | | |
| SNCA- | 273 | 657 | 10.605 | 4.275 | 30.587 | 4.495 | 19.739 | 2.385 | 18.628 | 3.478 |
| 1003 | | | | | | | | | | |
| SNCA- | 274 | 658 | 14.493 | 6.762 | | | | | | |
| 1004 | | | | | | | | | | |
| SNCA- | 275 | 659 | 21.933 | 9.807 | | | | | | |
| 1005 | | | | | | | | | | |
| SNCA- | 276 | 660 | 27.057 | 10.347 | | | | | | |
| 1028 | | | | | | | | | | |
| SNCA- | 277 | 661 | 29.887 | 8.996 | | | | | | |
| 1029 | | | | | | | | | | |
| SNCA- | 278 | 662 | 18.273 | 6.134 | | | | | | |
| 1030 | | | | | | | | | | |
| SNCA- | 279 | 663 | 62.219 | 21.153 | | | | | | |
| 1031 | | | | | | | | | | |
| SNCA- | 280 | 664 | 35.366 | 5.832 | | | | | | |
| 1032 | | | | | | | | | | |
| SNCA- | 281 | 665 | 22.3 | 6.342 | | | | | | |
| 1033 | | | | | | | | | | |
| SNCA- | 282 | 666 | 7.062 | 2.479 | 28.972 | 6.428 | 16.802 | 2.512 | 42.248 | 8.076 |
| 1034 | | | | | | | | | | |
| SNCA- | 283 | 667 | 16.393 | 6.443 | | | | | | |
| 1035 | | | | | | | | | | |
| SNCA- | 284 | 668 | 18.334 | 5.834 | | | | | | |
| 1036 | | | | | | | | | | |
| SNCA- | 285 | 669 | 25.424 | 6.451 | | | | | | |
| 1037 | | | | | | | | | | |
| SNCA- | 286 | 670 | 18.831 | 4.653 | | | | | | |
| 1038 | | | | | | | | | | |
| SNCA- | 287 | 671 | 24.154 | 7.567 | | | | | | |
| 1039 | | | | | | | | | | |
| SNCA- | 288 | 672 | 36.947 | 11.492 | | | | | | |
| 1040 | | | | | | | | | | |
| SNCA- | 289 | 673 | 13.823 | 6.008 | | | | | | |
| 1041 | | | | | | | | | | |
| SNCA- | 290 | 674 | 11.095 | 2.118 | 31.324 | 2.939 | 26.757 | 5.437 | 41.648 | 14.447 |
| 1042 | | | | | | | | | | |
| SNCA- | 291 | 675 | 7.35 | 2.454 | 38.997 | 5.081 | 22.643 | 3.492 | 40.713 | 7.375 |
| 1043 | | | | | | | | | | |
| SNCA- | 292 | 676 | 17.706 | 4.577 | | | | | | |
| 1044 | | | | | | | | | | |
| SNCA- | 293 | 677 | 16.292 | 2.168 | | | | | | |
| 1045 | | | | | | | | | | |
| SNCA- | 294 | 678 | 15.658 | 7.503 | | | | | | |
| 1046 | | | | | | | | | | |
| SNCA- | 295 | 679 | 15.639 | 3.306 | | | | | | |
| 1047 | | | | | | | | | | |
| SNCA- | 296 | 680 | 9.349 | 5.031 | 30.899 | 2.779 | 21.882 | 3.428 | 24.603 | 5.441 |
| 1048 | | | | | | | | | | |
| SNCA- | 297 | 681 | 23.163 | 9.595 | | | | | | |
| 1049 | | | | | | | | | | |
| SNCA- | 298 | 682 | 19.115 | 5.282 | | | | | | |
| 1050 | | | | | | | | | | |
| SNCA- | 299 | 683 | 27.655 | 7.553 | | | | | | |
| 1051 | | | | | | | | | | |
| SNCA- | 300 | 684 | 21.243 | 8.076 | | | | | | |
| 1052 | | | | | | | | | | |
| SNCA- | 301 | 685 | 15.077 | 4.191 | | | | | | |
| 1053 | | | | | | | | | | |
| SNCA- | 302 | 686 | 18.869 | 9.119 | | | | | | |
| 1054 | | | | | | | | | | |
| SNCA- | 303 | 687 | 26.89 | 15.696 | | | | | | |
| 1055 | | | | | | | | | | |
| SNCA- | 304 | 688 | 12.264 | 6.595 | 44.451 | 8.867 | 36.043 | 9.631 | 58.354 | 12.915 |
| 1056 | | | | | | | | | | |
| SNCA- | 305 | 689 | 20.41 | 6.387 | | | | | | |
| 1057 | | | | | | | | | | |
| SNCA- | 306 | 690 | 10.734 | 3.309 | 35.627 | 5.971 | 26.914 | 3.053 | 40.089 | 7.169 |
| 1058 | | | | | | | | | | |
| SNCA- | 307 | 691 | 13.259 | 4.184 | | | | | | |
| 1078 | | | | | | | | | | |
| SNCA- | 308 | 692 | 15.297 | 4.701 | | | | | | |
| 1079 | | | | | | | | | | |
| SNCA- | 309 | 693 | 12.222 | 5.155 | 36.869 | 6.201 | 25.214 | 2.551 | 39.187 | 9.278 |
| 1080 | | | | | | | | | | |
| SNCA- | 310 | 694 | 37.084 | 4.125 | | | | | | |
| 1086 | | | | | | | | | | |
| SNCA- | 311 | 695 | 35.676 | 6.696 | | | | | | |
| 1087 | | | | | | | | | | |
| SNCA- | 312 | 696 | 27.322 | 15.476 | | | | | | |
| 1088 | | | | | | | | | | |
| SNCA- | 313 | 697 | 68.397 | 25.077 | | | | | | |
| 1089 | | | | | | | | | | |
| SNCA- | 314 | 698 | 36.399 | 10.994 | | | | | | |
| 1090 | | | | | | | | | | |
| SNCA- | 315 | 699 | 37.696 | 6.729 | | | | | | |
| 1091 | | | | | | | | | | |
| SNCA- | 316 | 700 | 44.046 | 10.96 | | | | | | |
| 1092 | | | | | | | | | | |
| SNCA- | 317 | 701 | 31.816 | 8.953 | | | | | | |
| 1093 | | | | | | | | | | |
| SNCA- | 318 | 702 | 73.504 | 28.254 | | | | | | |
| 1116 | | | | | | | | | | |
| SNCA- | 319 | 703 | 25.707 | 8.623 | | | | | | |
| 1117 | | | | | | | | | | |
| SNCA- | 320 | 704 | 21.994 | 3.997 | | | | | | |
| 1119 | | | | | | | | | | |
| SNCA- | 321 | 705 | 18.984 | 6.632 | | | | | | |
| 1120 | | | | | | | | | | |
| SNCA- | 322 | 706 | 25.181 | 10.677 | | | | | | |
| 1121 | | | | | | | | | | |
| SNCA- | 323 | 707 | 8.715 | 4.101 | 58.375 | 28.834 | 24.834 | 2.818 | 48.721 | 14.78 |
| 1122 | | | | | | | | | | |
| SNCA- | 324 | 708 | 10.026 | 4.496 | 36.377 | 4.91 | 27.322 | 6.134 | 44.703 | 8.901 |
| 1123 | | | | | | | | | | |
| SNCA- | 325 | 709 | 27.046 | 12.269 | | | | | | |
| 1124 | | | | | | | | | | |
| SNCA- | 326 | 710 | 29.562 | 9.796 | | | | | | |
| 1125 | | | | | | | | | | |
| SNCA- | 327 | 711 | 17.413 | 9.769 | | | | | | |
| 1126 | | | | | | | | | | |
| SNCA- | 328 | 712 | 17.312 | 7.13 | | | | | | |
| 1127 | | | | | | | | | | |
| SNCA- | 329 | 713 | 25.66 | 5.656 | | | | | | |
| 1128 | | | | | | | | | | |
| SNCA- | 330 | 714 | 12.245 | 7.949 | 32.214 | 4.276 | 31.044 | 4.133 | 57.233 | 8.853 |
| 1129 | | | | | | | | | | |
| SNCA- | 331 | 715 | 34.35 | 15.109 | | | | | | |
| 1130 | | | | | | | | | | |
| SNCA- | 332 | 716 | 28.425 | 8.875 | | | | | | |
| 1131 | | | | | | | | | | |
| SNCA- | 333 | 717 | 18.938 | 7.034 | | | | | | |
| 1132 | | | | | | | | | | |
| SNCA- | 334 | 718 | 19.037 | 6.871 | | | | | | |
| 1133 | | | | | | | | | | |
| SNCA- | 335 | 719 | 51.074 | 16.21 | | | | | | |
| 1194 | | | | | | | | | | |
| SNCA- | 336 | 720 | 66.934 | 20.682 | | | | | | |
| 1195 | | | | | | | | | | |
| SNCA- | 337 | 72 | 20.218 | 6.253 | | | | | | |
| 1196 | | | | | | | | | | |
| SNCA- | 338 | 722 | 21.898 | 9.87 | | | | | | |
| 1197 | | | | | | | | | | |
| SNCA- | 339 | 723 | 20.282 | 3.906 | | | | | | |
| 1198 | | | | | | | | | | |
| SNCA- | 340 | 724 | 21.535 | 5.1 | | | | | | |
| 1199 | | | | | | | | | | |
| SNCA- | 341 | 725 | 19.277 | 3.967 | | | | | | |
| 1200 | | | | | | | | | | |
| SNCA- | 342 | 726 | 18.381 | 8.987 | | | | | | |
| 1201 | | | | | | | | | | |
| SNCA- | 343 | 727 | 21.481 | 4.71 | | | | | | |
| 1202 | | | | | | | | | | |
| SNCA- | 344 | 728 | 31.249 | 3.839 | | | | | | |
| 1203 | | | | | | | | | | |
| SNCA- | 345 | 729 | 26.626 | 4.995 | | | | | | |
| 1204 | | | | | | | | | | |
| SNCA- | 346 | 730 | 22.175 | 3.4 | | | | | | |
| 1205 | | | | | | | | | | |
| SNCA- | 347 | 731 | 27.216 | 6.526 | | | | | | |
| 1206 | | | | | | | | | | |
| SNCA- | 348 | 732 | 18.742 | 6.75 | | | | | | |
| 1207 | | | | | | | | | | |
| SNCA- | 349 | 733 | 15.897 | 4.168 | | | | | | |
| 1208 | | | | | | | | | | |
| SNCA- | 350 | 734 | 61.901 | 10.051 | | | | | | |
| 1250 | | | | | | | | | | |
| SNCA- | 351 | 735 | 17.747 | 3.922 | | | | | | |
| 1252 | | | | | | | | | | |
| SNCA- | 352 | 736 | 64.716 | 19.519 | | | | | | |
| 1253 | | | | | | | | | | |
| SNCA- | 353 | 737 | 56.022 | 16.549 | | | | | | |
| 1254 | | | | | | | | | | |
| SNCA- | 354 | 738 | 52.129 | 15.261 | | | | | | |
| 1255 | | | | | | | | | | |
| SNCA- | 355 | 739 | 42.31 | 13.171 | | | | | | |
| 1256 | | | | | | | | | | |
| SNCA- | 356 | 740 | 40.958 | 14.053 | | | | | | |
| 1257 | | | | | | | | | | |
| SNCA- | 357 | 741 | 50.463 | 11.568 | | | | | | |
| 1258 | | | | | | | | | | |
| SNCA- | 358 | 742 | 45.852 | 5.684 | | | | | | |
| 1259 | | | | | | | | | | |
| SNCA- | 359 | 743 | 44.782 | 7.958 | | | | | | |
| 1260 | | | | | | | | | | |
| SNCA- | 360 | 744 | 50.171 | 24.931 | | | | | | |
| 1261 | | | | | | | | | | |
| SNCA- | 361 | 745 | 65.255 | 14.437 | | | | | | |
| 1262 | | | | | | | | | | |
| SNCA- | 362 | 746 | 73.142 | 16.725 | | | | | | |
| 1263 | | | | | | | | | | |
| SNCA- | 363 | 747 | 58.931 | 8.389 | | | | | | |
| 1264 | | | | | | | | | | |
| SNCA- | 364 | 748 | 57.598 | 12.06 | | | | | | |
| 1265 | | | | | | | | | | |
| SNCA- | 365 | 749 | 55.266 | 14.495 | | | | | | |
| 1266 | | | | | | | | | | |
| SNCA- | 366 | 750 | 56.807 | 29.36 | | | | | | |
| 1267 | | | | | | | | | | |
| SNCA- | 367 | 751 | 74.116 | 27.182 | | | | | | |
| 1351 | | | | | | | | | | |
| SNCA- | 368 | 752 | 112.666 | 17.184 | | | | | | |
| 1365 | | | | | | | | | | |
| SNCA- | 369 | 753 | 56.007 | 23.106 | | | | | | |
| 1372 | | | | | | | | | | |
| SNCA- | 370 | 754 | 162.449 | 57.315 | | | | | | |
| 1373 | | | | | | | | | | |
| SNCA- | 371 | 755 | 66.819 | 32.556 | | | | | | |
| 1374 | | | | | | | | | | |
| SNCA- | 372 | 756 | 50.369 | 5.421 | | | | | | |
| 1375 | | | | | | | | | | |
| SNCA- | 373 | 757 | 78.47 | 14.83 | | | | | | |
| 1376 | | | | | | | | | | |
| SNCA- | 374 | 758 | 66.513 | 14.808 | | | | | | |
| 1377 | | | | | | | | | | |
| SNCA- | 375 | 759 | 181.273 | 49.399 | | | | | | |
| 1379 | | | | | | | | | | |
| SNCA- | 376 | 760 | 144.261 | 36.281 | | | | | | |
| 1380 | | | | | | | | | | |
| SNCA- | 377 | 761 | 142.144 | 37.588 | | | | | | |
| 1381 | | | | | | | | | | |
| SNCA- | 378 | 762 | 167.898 | 45.832 | | | | | | |
| 1382 | | | | | | | | | | |
| SNCA- | 379 | 763 | 76.222 | 15.027 | | | | | | |
| 1383 | | | | | | | | | | |
| SNCA- | 380 | 764 | 69.315 | 30.999 | | | | | | |
| 1384 | | | | | | | | | | |
| SNCA- | 381 | 765 | 84.66 | 18.066 | | | | | | |
| 1385 | | | | | | | | | | |
| SNCA- | 382 | 766 | 64.157 | 29.244 | | | | | | |
| 1388 | | | | | | | | | | |
| SNCA- | 383 | 767 | 85.836 | 14.2 | | | | | | |
| 1428 | | | | | | | | | | |
| SNCA- | 384 | 768 | 240.2 | 76.094 | | | | | | |
| 1429 | | | | | | | | | | |

### Example 3: GalNAc-Conjugated SNCA-Targeting RNAi Oligonucleotides Inhibit Human SNCA mRNA Expression In Vivo

[1178] The in vitro screening assays in Example 2 validated the ability of SNCA-targeting RNAi oligonucleotides to knock-down target SNCA mRNA. To further evaluate the ability of SNCA-targeting RNAi oligonucleotides to inhibit SNCA mRNA expression, GalNAc-conjugated SNCA-targeting RNAi oligonucleotides were generated to confirm knockdown in vivo.

[1179] Specifically, a subset of the DsiRNAs identified in Example 2 were used to generate corresponding ds RNAi oligonucleotides comprising a nicked tetraL GalNAc-conjugated structure (referred to herein as “GalNAc-conjugated SNCA oligonucleotides” or “GalNAc-SNCA oligonucleotides”) having a 36-mer passenger strand and a 22-mer guide strand (Tables 4 and 5). Further, the nucleotide sequences comprising the sense strand and the antisense strand have a distinct pattern of modified nucleotides and phosphorothioate linkages. Three of the nucleotides comprising the tetraL were each conjugated to a GalNAc moiety (CAS #14131-60-3). The modification patterns are illustrated below:

Sense Strand:
5′-mX-S-mX-fX-mX-fX-mX-mX-fX-mX-fX-mX-fX-
fX-mX-fX-mX-fX-mX-mX-mX-mX-mX-mX-mX-mX-mX-
mX-[ademX-GalNAc][ademX-GalNAc][ademX-
GalNAc]-mX-mX-mX-mX-mX-mX-3′
hybridized to:
Antisense Strand:
5′-MePhosphonate-4O-mX-S-fX-S-fX-fX-fX-mX-
fX-mX-mX-fX-mX-mX-mX-fX-mX-fX-mX-mX-fX-mX-
S-mX-S-mX-3′(Modification key: Table 3).

Or, represented as:

Sense Strand:
5′-[mXs][mX][fX][mX][fX][mX][mX][fX][mX][fX]
[mX][fX][fX][mX][fX][X][fX][mX][mX][mX][mX]
[mX][mX][mX][mX][mX][mX][ademX-GalNAc]
[ademX-GalNAc][ademX-GalNAc][mX][mX][mX]
[mX][X][mX]-3′
hybridized to:
Antisense Strand:
5′-[MePhosphonate-4O-mXs][fXs][fX][X][fX]
[mX][fX][mX][mX][fX][X][mX][mX][X][mX][fX]
[mX][mX][fX][mXs][mXs][mX]-3′
(Modification key: Table 3).

TABLE 3
Key for Modification Patterns.

| | |
|---|---|
| Symbol | Modification/linkage |

Key 1

| | |
|---|---|
| mX | 2′-OMe modified nucleotide |
| fX | 2′-F modified nucleotide |
| —S— | phosphorothioate linkage |
| — | phosphodiester linkage |
| [MePhosphonate-40-mX] | 4′-O-monomethylphosphonate-2′-O-methyl |
| | modified nucleotide |
| ademX-GalNAc | GalNAc attached to a nucleotide |
| ademX-C₁₆ | C₁₆ hydrocarbon chain attached to a nucleotide |

Key 2

| | |
|---|---|
| [mXs] | 2′-OMe modified nucleotide with a |
| | phosphorothioate linkage to the neighboring |
| | nucleotide |
| [fXs] | 2′-F modified nucleotide with a |
| | phosphorothioate linkage to the neighboring |
| | nucleotide |
| [mX] | 2′-OMe modified nucleotide with |
| | phosphodiester linkages to neighboring |
| | nucleotides |
| [fX] | 2′-F modified nucleotide with |
| | phosphodiester linkages to neighboring |
| | nucleotides |
| [ademXs-C₁₆] | C₁₆ hydrocarbon chain attached to a nucleotide |
| | with phosphodiester linkages to neighboring |
| | nucleotides |

[1180] The GalNAc-conjugated SNCA-targeting oligonucleotides were used in a hydrodynamic injection (HDI) mouse model to confirm the ability of the RNAi oligonucleotides to knockdown SNCA gene expression in vivo. The GalNAc-conjugated SNCA-targeting oligonucleotides listed in Tables 4 and 5 were evaluated in mice engineered to transiently express human SNCA mRNA in hepatocytes of the mouse liver. Briefly, 6-8-week-old female CD-1 mice were subcutaneously administered the indicated GalNAc-conjugated SNCA-targeting oligonucleotides at a dose of 3 mg/kg formulated in PBS. A control group of mice (n=5) were administered only PBS. Three days later (72 hours), the mice were HDI with a DNA plasmid encoding the full human SNCA (SEQ ID NO: 1677) (10 μg) under control of a ubiquitous cytomegalovirus (CMV) promoter sequence. One day after introduction of the DNA plasmid, liver samples from HDI mice were collected. Total RNA derived from these HDI mice were subjected to qRT-PCR analysis to determine human SNCA mRNA levels as described in Example 2. The values were normalized for transfection efficiency using the NeoR gene included on the DNA plasmid. Benchmark control SNCA-291 was used to confirm successful knock-down.

TABLE 4
GalNAc-Conjugated Human SNCA RNAi
Oligonucleotides for HDI screen.

| | SEQ | SEQ | SEQ | SEQ |
|---|---|---|---|---|
| | ID NO | ID NO | ID NO | ID NO |
| RNAi | (Sense) | (Antisense) | (Sense) | (Antisense) |
| Oligonucleotide | Unmodified | | Modified | |
| SNCA-227 | 1537 | 1572 | 1607 | 1642 |
| SNCA-228 | 1538 | 1573 | 1608 | 1643 |
| SNCA-242 | 1539 | 1574 | 1609 | 1644 |
| SNCA-244 | 1540 | 1575 | 1610 | 1645 |
| SNCA-248 | 1541 | 1576 | 1611 | 1646 |
| SNCA-254 | 1542 | 1577 | 1612 | 1647 |
| SNCA-342 | 1543 | 1578 | 1613 | 1648 |
| SNCA-351 | 1544 | 1579 | 1614 | 1649 |
| SNCA-421 | 1545 | 1580 | 1615 | 1650 |
| SNCA-426 | 1546 | 1581 | 1616 | 1651 |
| SNCA-434 | 1547 | 1582 | 1617 | 1652 |
| SNCA-657 | 1548 | 1583 | 1618 | 1653 |
| SNCA-675 | 1549 | 1584 | 1619 | 1654 |
| SNCA-737 | 1550 | 1585 | 1620 | 1655 |
| SNCA-751 | 1551 | 1586 | 1621 | 1656 |
| SNCA-757 | 1552 | 1587 | 1622 | 1657 |
| SNCA-801 | 1553 | 1588 | 1623 | 1658 |
| SNCA-291 | 1554 | 1589 | 1624 | 1659 |

TABLE 5
GalNAc-Conjugated Human SNCA RNAi
Oligonucleotides for HDI screen.

| | SEQ | SEQ | SEQ | SEQ |
|---|---|---|---|---|
| | ID NO | ID NO | ID NO | ID NO |
| RNAi | (Sense) | (Antisense) | (Sense) | (Antisense) |
| Oligonucleotide | Unmodified | | Modified | |
| SNCA-230 | 1558 | 1593 | 1628 | 1663 |
| SNCA-250 | 1559 | 1594 | 1629 | 1664 |
| SNCA-429 | 1560 | 1595 | 1630 | 1665 |
| SNCA-642 | 1561 | 1596 | 1631 | 1666 |
| SNCA-676 | 1562 | 1597 | 1632 | 1667 |
| SNCA-730 | 1563 | 1598 | 1633 | 1668 |
| SNCA-752 | 1564 | 1599 | 1634 | 1669 |
| SNCA-760 | 1565 | 1600 | 1635 | 1670 |
| SNCA-800 | 1566 | 1601 | 1636 | 1671 |
| SNCA-892 | 1567 | 1602 | 1637 | 1672 |
| SNCA-893 | 1568 | 1603 | 1638 | 1673 |
| SNCA-986 | 1555 | 1590 | 1625 | 1660 |
| SNCA-995 | 1569 | 1604 | 1639 | 1674 |
| SNCA-1003 | 1570 | 1605 | 1640 | 1675 |
| SNCA-1034 | 1556 | 1591 | 1626 | 1661 |
| SNCA-1043 | 1557 | 1592 | 1627 | 1662 |
| SNCA-1048 | 1571 | 1606 | 1641 | 1676 |
| SNCA-291 | 1554 | 1589 | 1624 | 1659 |

[1181] The results in FIGS. 1A and 1B demonstrate that GalNAc-conjugated SNCA oligonucleotides (as shown in Tables 4 and 5, respectively) designed to target human SNCA mRNA successfully inhibited human SNCA mRNA expression in HDI mice, as determined by a reduction in the amount of human SNCA mRNA expression in liver samples from HDI mice treated with GalNAc-conjugated SNCA oligonucleotides relative to control HDI mice treated with only PBS.

### Example 4: GalNAc-Conjugated SNCA RNAi Oligonucleotides Inhibit Human SNCA Gene Expression in a Dose-Dependent Manner

[1182] To further evaluate the ability of GalNAc-conjugated SNCA RNAi oligonucleotides to inhibit SNCA expression a dose response study was carried out. Specifically, in separate treatment groups, selected GalNAc-conjugated SNCA RNAi oligonucleotides (Tables 6 and 7) were formulated in PBS and administered to CD-1 mice at doses of 0.3 mg/kg, 1 mg/kg, or 3 mg/kg subcutaneously. As described in Example 3, a human SNCA DNA expression plasmid was administered to the mice 3 days post-oligonucleotide dosing, and livers were collected 24 hours later for qRT-PCR analysis. As shown in FIGS. 2A and 2B, all of the GalNAc-conjugated SNCA RNAi oligonucleotides tested inhibited human SNCA gene expression in a dose-dependent manner. Potent GalNAc-conjugated SNCA oligonucleotides (i.e., SNCA-244, SNCA-429, SNCA-751, SNCA-752, SNCA-800, SNCA-801, and SNCA1003) reduced SNCA mRNA by about 50% or more at 1 mg/kg and even further at 3 mg/kg. Select constructs were chosen for further studies in non-human primates.

TABLE 6
GalNAc-Conjugated Human SNCA RNAi
Oligonucleotides for Dose Screen.

| | SEQ | SEQ | SEQ | SEQ |
|---|---|---|---|---|
| | ID NO | ID NO | ID NO | ID NO |
| RNAi | (Sense) | (Antisense) | (Sense) | (Antisense) |
| Oligonucleotide | Unmodified | | Modified | |
| SNCA-244 | 1540 | 1575 | 1610 | 1645 |
| SNCA-351 | 1544 | 1579 | 1614 | 1649 |
| SNCA-426 | 1546 | 1581 | 1616 | 1651 |
| SNCA-751 | 1551 | 1586 | 1621 | 1656 |
| SNCA-757 | 1552 | 1587 | 1622 | 1657 |
| SNCA-801 | 1553 | 1588 | 1623 | 1658 |

TABLE 7
GalNAc-Conjugated Human SNCA RNAi
Oligonucleotides for Dose Screen.

| | SEQ | SEQ | SEQ | SEQ |
|---|---|---|---|---|
| | ID NO | ID NO | ID NO | ID NO |
| RNAi | (Sense) | (Antisense) | (Sense) | (Antisense) |
| Oligonucleotide | Unmodified | | Modified | |
| SNCA-250 | 1558 | 1594 | 1629 | 1664 |
| SNCA-429 | 1560 | 1595 | 1630 | 1665 |
| SNCA-752 | 1564 | 1599 | 1634 | 1669 |
| SNCA-760 | 1565 | 1600 | 1635 | 1670 |
| SNCA-800 | 1566 | 1601 | 1636 | 1671 |
| SNCA-1003 | 1570 | 1605 | 1640 | 1675 |

### Example 5: RNAi Oligonucleotide Inhibition of SNCA Gene Expression in NHP CNS

[1183] Effective GalNAc-conjugated SNCA-targeting oligonucleotides identified in the HDI mouse studies were assayed for inhibition in NHPs. Specifically, GalNAc-conjugated SNCA-targeting oligonucleotides listed in Table 8 were evaluated in non-naïve cynomolgus monkeys (Macaca fascicularis). Each cohort contained 2 male and 2 female subjects. The GalNAc-conjugated SNCA-targeting oligonucleotides were administered at a dose of 50 mg in 1.6 mL of artificial cerebrospinal fluid (aCSF) on study days 0 and 7 via intra cisterna magna (i.c.m.) injection.

TABLE 8
GalNAc-Conjugated SNCA RNAi Oligonucleotides
for NHP Study.

| | SEQ | SEQ | SEQ | SEQ |
|---|---|---|---|---|
| | ID NO | ID NO | ID NO | ID NO |
| RNAi | (Sense) | (Antisense) | (Sense) | (Antisense) |
| Oligonucleotide | Unmodified | | Modified | |
| SNCA-0801 | 1553 | 1588 | 1623 | 1658 |
| SNCA-0429 | 1560 | 1595 | 1630 | 1665 |
| SNCA-0752 | 1564 | 1599 | 1634 | 1669 |
| SNCA-0751 | 1551 | 1586 | 1621 | 1656 |
| SNCA-1003 | 1570 | 1605 | 1640 | 1675 |

[1184] On study day 14, CNS tissue was collected and subjected to qRT-PCR analysis to measure SNCA mRNA in oligonucleotide-treated monkeys relative to those treated with a comparable volume of aCSF. To normalize the data, the measurements were made relative to 2 reference genes, RPL23 and GAPDH (the geometric mean between the two was used as the set point for on target KD). The following SYBR assays purchased from Integrated DNA Technologies were used to evaluate gene expressions: Forward: ACAGTGG CTGAGAAGACCAA (SEQ ID NO: 2454), Reverse: CTCCCTCCACTGTCTTCTGG (SEQ ID NO: 2455); and Probe: ACCCGTCACCACCGCTCCTCC (SEQ ID NO: 2456).

[1185] As shown in FIGS. 3A-3S (Day 14), treating NHPs with the GalNAc-conjugated SNCA-targeting oligonucleotides inhibited SNCA gene expression in several regions of the CNS, as determined by a reduced amount of SNCA mRNA in brain samples from oligonucleotide-treated NHPs relative to NHPs treated with aCSF. Several GalNAc-conjugated SNCA-targeting oligonucleotides reduced SNCA gene expression throughout the CNS. SNCA-801 and SNCA-751 were particularly potent and reduced SNCA mRNA by at least 50% in the frontal cortex, hippocampus, parietal cortex, occipital cortex, temporal cortex, brain stem, cervical spinal cord, thoracic spinal cord, and lumbar spinal cord. These results demonstrate that treating NHPs with the GalNAc-conjugated SNCA-targeting oligonucleotides reduces the amount of SNCA mRNA in the CNS.

### Example 6: Lipid-Conjugated RNAi Oligonucleotide Targeting SNCA Reduces Gene Expression in NHP CNS

[1186] To further investigate the efficacy of oligonucleotides targeting SNCA, a lipid-conjugated oligonucleotide was assessed in NHP. Specifically, SNCA-0751 was selected based on the above studies, and the sense strand was formatted as a 20mer sense strand with a lipid conjugated to the 5′ terminal nucleotide. This construct is referred to as SNCA-B15, having a 20mer sense strand and 22mer antisense strand (SEQ ID NOs: 1682 and 1656, respectively). The chemical modification pattern of the lipid-conjugated oligonucleotide is provided below:

Sense Strand:
5′-[ademX-C₁₆]-S-mX-fX-mX-fX-mX-mX-fX-mX-
fX-mX-fX-fX-mX-fX-mX-fX-mX-S-mX-S-mX-3′
hybridized to:
Antisense Strand:
5′-[MePhosphonate-4O-mX]-S-fX-S-fX-fX-fX-
mX-fX-mX-mX-fX-mX-mX-mX-fX-mX-fX-mX-mX-
fX-mX-S-mX-S-mX 3′
(Modification key: Table 3).

Or, represented as:

Sense Strand:
5′-[ademXs-C₁₆][mX][fX][mX][fX][mX][X]
[fX][mX][fX][mX][fX][fX][mX][fX][mX][fX]
[mXs][mXs][mX]-3′
hybridized to:
Antisense Strand:
5′-[MePhosphonate-4O-mXs][fXs][fX][fX]
[fX][mX][fX][mX][mX][fX][X][mX][mX][fX]
[mX][fX][X][mX][fX][mXs][mXs][mX]-3′
(Modification key: Table 3).

### Lipid Conjugation

[1187] Lipid-conjugated blunt-ended oligonucleotides were synthesized using a standard procedure known in the literature for oligo synthesis on a synthesizer using amidite chemistry (see, Matteucci & Caruthers (1981) Tetrahedron Lett. 21:719-22¹; Beaucage & Caruthers (1981) Tetrahedron Lett. 22:1859-62²). ¹Matteucci M D, Caruthers M H. The synthesis of oligodeoxypyrimidines on a polymer support. Tetrahedron Lett. 1980; 21(8):719-722.²Beaucage S L, Caruthers M H. Deoxynucleoside phosphoramidites-A new class of key intermediates for deoxypolynucleotides. Tetrahedron Lett. 1981; 22(20):1859-1862

[1188] Conjugation of a lipid moiety to the SNCA-targeting oligonucleotide was carried out using phosphoramidite synthesis as shown below:

### Synthesis of 2-(2-((((6aR,8R,9R,9aR)-8-(6-benzamido-9H-purin-9-yl)-2,2,4,4-tetraisopropyltetrahydro-6H-furo[3,2-f][1,3,5,2,4]trioxadisilocin-9-yl)oxy)methoxy)ethoxy) ethan-1-ammonium formate (1-6)

[chemical structure]

[1190] A solution of compound 1-1 (25.00 g, 67.38 mmol) in 20 mL of DMF was treated with pyridine (11 mL, 134.67 mmol) and tetraisopropyldisiloxane dichloride (22.63 mL, 70.75 mmol) at 10° C. The resulting mixture was stirred at 25° C. for 3 hr and quenched with 20% citric acid (50 mL). The aqueous layer was extracted with EtOAc (3×50 mL), and the combined organic layers were concentrated in vacuo. The crude residue was recrystallized from a mixture of MTBE and n-heptane (1:15, 320 mL) to afford compound 1-2 (37.20 g, 90%) as a white oily solid.

[1191] A solution of compound 1-2 (37.00 g, 60.33 mmol) in 20 mL of DMSO was treated with AcOH (20 mL, 317.20 mmol) and Ac₂O (15 mL, 156.68 mmol). The mixture was stirred at 25° C. for 15 hr. The reaction was diluted with EtOAc (100 mL) and quenched with sat. K₂CO₃ (50 mL). The aqueous layer was extracted with EtOAc (3×50 mL). The combined organic layers were concentrated and recrystallized with ACN (30 mL) to afford compound 1-3 (15.65 g, 38.4%) as a white solid.

[1192] A solution of compound 1-3 (20.00 g, 29.72 mmol) in 120 mL of DCM was treated with Fmoc-amino-ethoxy ethanol (11.67 g, 35.66 mmol) at 25° C. The mixture was stirred to afford a clear solution and then treated with 4 Å molecular sieves (20.0 g), N-iodosuccinimide (8.02 g, 35.66 mmol), and TfOH (5.25 mL, 59.44 mmol). The mixture was stirred at 30° C. until the HPLC analysis indicated >95% consumption of compound 1-3. The reaction was quenched with TEA (6 mL) and filtered. The filtrate was diluted with EtOAc, washed with sat. NaHCO₃ (2×100 mL), sat. Na₂SO₃ (2×100 mL), and water (2×100 mL) and concentrated in vacuo to afford crude compound 1-4 (26.34 g, 93.9%) as a yellow solid, which was used directly for the next step without further purification.

[1193] A solution of compound 1-4 (26.34 g, 27.62 mmol) in a mixture of DCM/water (10:7, 170 mL) was treated with DBU (7.00 mL, 45.08 mmol) at 5° C. The mixture was stirred at 5-25° C. for 1 hr. The organic layer was then separated, washed with water (100 mL), and diluted with DCM (130 mL). The solution was treated with fumaric acid (7.05 g, 60.76 mmol) and 4 Å molecular sieves (26.34 g) in 4 portions. The mixture was stirred for 1 hr, concentrated, and recrystallized from a mixture of MTBE and DCM (5:1) to afford compound 1-6 (14.74 g, 62.9%) as a white solid: ¹H NMR (400 MHz, d₆-DMSO) 8.73 (s, 1H), 8.58 (s, 1H), 8.15-8.02 (m, 2H), 7.65-7.60 (m, 1H), 7.59-7.51 (m, 2H), 6.52 (s, 2H), 6.15 (s, 1H), 5.08-4.90 (m, 3H), 4.83-4.78 (m, 1H), 4.15-3.90 (m, 3H), 3.79-3.65 (m, 2H), 2.98-2.85 (m, 6H), 1.20-0.95 (m, 28H).

### Synthesis of (2R,3R,4R,5R)-5-(6-benzamido-9H-purin-9-yl)-2-((bis(4-methoxyphenyl)(phenyl)methoxy)methyl)-4-((2-(2-[lipid]-amidoethoxy)ethoxy)methoxy) tetrahydrofuran-3-yl (2-cyanoethyl) diisopropylphosphoramidite (2-4a to 2-4e)

[chemical structure]

[1195] A solution of compound 1-6 (50.00 g, 59.01 mmol) in 150 mL of 2-methyltetrahydrofuran was washed with ice cold aqueous K₂HPO₄ (6%, 100 mL) and brine (20%, 2λ100 mL). The organic layer was separated and treated with hexanoic acid (10.33 mL, 82.61 mmol), HATU (33.66 g, 88.52 mmol), and DMAP (10.81 g, 147.52 mmol) at 0° C. The resulting mixture was warmed to 25° C. and stirred for 1 hr. The solution was washed with water (2×100 mL), brine (100 mL), and concentrated in vacuo to afford a crude residue. Flash chromatography on silica gel (1:1 hexanes/acetone) gave compound 2-1a (34.95 g, 71.5%) as a white solid.

[1196] A mixture of compound 2-1a (34.95 g, 42.19 mmol) and TEA (9.28 mL, 126.58 mmol) in 80 mL of THF was treated with triethylamine trihydrofluoride (20.61 mL, 126.58 mmol) dropwise at 10° C. The mixture was warmed to 25° C. and stirred for 2 hr. The reaction was concentrated, dissolved in DCM (100 mL), and washed with sat. NaHCO₃ (5×20 mL) and brine (50 mL). The organic layer was concentrated in vacuo to afford crude compound 2-2a (24.72 g, 99%), which was used directly for the next step without further purification.

[1197] A solution of compound 2-2a (24.72 g, 42.18 mmol) in 50 mL of DCM was treated with N-methylmorpholine (18.54 mL, 168.67 mmol) and DMTr-Cl (15.69 g, 46.38 mmol). The mixture was stirred at 25° C. for 2 hr and quenched with sat. NaHCO₃ (50 mL). The organic layer was separated, washed with water, and concentrated to afford a slurry crude. Flash chromatography on silica gel (1:1 hexanes/acetone) gave compound 2-3a (30.05 g, 33.8 mmol, 79.9%) as a white solid.

[1198] A solution of compound 2-3a (25.00 g, 28.17 mmol) in 50 mL of DCM was treated with N-methylmorpholine (3.10 mL, 28.17 mmol) and tetrazole (0.67 mL, 14.09 mmol) under nitrogen atmosphere. Bis(diisopropylamino) chlorophosphine (9.02 g, 33.80 mmol) was added to the solution dropwise and the resulting mixture was stirred at 25° C. for 4 hr. The reaction was quenched with water (15 mL), and the aqueous layer was extracted with DCM (3×50 mL). The combined organic layers were washed with sat. NaHCO₃ (50 mL), concentrated to afford a crude solid that was recrystallized from a mixture of DCM/MTBE/n-hexane (1:4:40) to afford compound 2-4a (25.52 g, 83.4%) as a white solid: ¹H NMR (400 MHz, d₆-DMSO) 11.25 (s, 1H), 8.65-8.60 (m, 2H), 8.09-8.02 (m, 2H), 7.71 (s, 1H), 7.67-7.60 (m, 1H), 7.59-7.51 (m, 2H), 7.38-7.34 (m, 2H), 7.30-7.25 (m, 7H), 6.85-6.79 (m, 4H), 6.23-6.20 (m, 1H), 5.23-5.14 (m, 1H), 4.80-4.69 (m, 3H), 4.33-4.23 (m, 2H), 3.90-3.78 (m, 1H), 3.75 (s, 6H), 3.74-3.52 (m, 3H), 3.50-3.20 (m, 6H), 3.14-3.09 (m, 2H), 3.09 (s, 1H), 2.82-2.80 (m, 1H), 2.65-2.60 (m, 1H), 2.05-1.96 (m, 2H), 1.50-1.39 (m, 2H), 1.31-1.10 (m, 14H), 1.08-1.05 (m, 2H), 0.85-0.79 (m, 3H); ³¹P NMR (162 MHz, d₆-DMSO) 149.43, 149.18.

[1199] Compound 2-4b, 2-4c, 2-4d, and 2-4e were prepared using similar procedures described above for compound 2-4a. Compound 2-4b was obtained (25.50 g, 85.4%) as a white solid: ¹H NMR (400 MHz, d₆-DMSO) 11.23 (s, 1H), 8.65-8.60 (m, 2H), 8.05-8.02 (m, 2H), 7.73-7.70 (m, 1H), 7.67-7.60 (m, 1H), 7.59-7.51 (m, 2H), 7.38-7.34 (m, 2H), 7.30-7.25 (m, 7H), 6.89-6.80 (m, 4H), 6.21-6.15 (m, 1H), 5.23-5.17 (m, 1H), 4.80-4.69 (m, 3H), 4.40-4.21 (m, 2H), 3.91-3.80 (m, 1H), 3.74 (s, 6H), 3.74-3.52 (m, 3H), 3.50-3.20 (m, 6H), 3.14-3.09 (m, 2H), 3.09 (s, 1H), 2.83-2.79 (m, 1H), 2.68-2.62 (m, 1H), 2.05-1.97 (m, 2H), 1.50-1.38 (m, 2H), 1.31-1.10 (m, 18H), 1.08-1.05 (m, 2H), 0.85-0.78 (m, 3H); ³¹P NMR (162 MHz, d₆-DMSO) 149.43, 149.19.

[1200] Compound 2-4c was obtained (36.60 g, 66.3%) as an off-white solid: ¹H NMR (400 MHz, d₆-DMSO) 11.22 (s, 1H), 8.64-8.59 (m, 2H), 8.05-8.00 (m, 2H), 7.73-7.70 (m, 1H), 7.67-7.60 (m, 1H), 7.59-7.51 (m, 2H), 7.38-7.34 (m, 2H), 7.30-7.25 (m, 7H), 6.89-6.80 (m, 4H), 6.21-6.15 (m, 1H), 5.25-5.17 (m, 1H), 4.80-4.69 (m, 3H), 4.40-4.21 (m, 2H), 3.91-3.80 (m, 1H), 3.74 (s, 6H), 3.74-3.50 (m, 3H), 3.50-3.20 (m, 6H), 3.14-3.09 (m, 2H), 3.09 (s, 1H), 2.83-2.79 (m, 1H), 2.68-2.62 (m, 1H), 2.05-1.99 (m, 2H), 1.50-1.38 (m, 2H), 1.33-1.12 (m, 38H), 1.08-1.05 (m, 2H), (m, 3H); ³¹P NMR (162 MHz, d₆-DMSO) 149.42, 149.17.

[1201] Compound 2-4d was obtained (26.60 g, 72.9%) as an off-white solid: ¹H NMR (400 MHz, d₆-DMSO) 11.22 (s, 1H), 8.64-8.59 (m, 2H), 8.05-8.00 (m, 2H), 7.73-7.70 (m, 1H), 7.67-7.60 (m, 1H), 7.59-7.51 (m, 2H), 7.38-7.33 (m, 2H), 7.30-7.25 (m, 7H), 6.89-6.80 (m, 4H), 6.21-6.15 (m, 1H), 5.22-5.17 (m, 1H), 4.80-4.69 (m, 3H), 4.40-4.21 (m, 2H), 3.91-3.80 (m, 1H), 3.74 (s, 6H), 3.74-3.52 (m, 3H), 3.50-3.20 (m, 6H), 3.14-3.09 (m, 2H), 3.09 (s, 1H), 2.83-2.79 (m, 1H), 2.68-2.62 (m, 1H), 2.05-1.99 (m, 2H), 1.50-1.38 (m, 2H), 1.35-1.08 (m, 38H), 1.08-1.05 (m, 2H), (m, 3H); ³¹P NMR (162 MHz, d₆-DMSO) 149.47, 149.22.

[1202] Compound 2-4e was obtained (38.10 g, 54.0%) as a white solid: ¹H NMR (400 MHz, d₆-DMSO) 11.21 (s, 1H), 8.64-8.59 (m, 2H), 8.05-8.00 (m, 2H), 7.73-7.70 (m, 1H), 7.67-7.60 (m, 1H), 7.59-7.51 (m, 2H), 7.38-7.34 (m, 2H), 7.30-7.25 (m, 7H), 6.89-6.80 (m, 4H), 6.21-6.15 (m, 1H), 5.23-5.17 (m, 1H), 4.80-4.69 (m, 3H), 4.40-4.21 (m, 2H), 3.91-3.80 (m, 1H), 3.73 (s, 6H), 3.74-3.52 (m, 3H), 3.47-3.22 (m, 6H), 3.14-3.09 (m, 2H), 3.09 (s, 1H), 2.83-2.79 (m, 1H), 2.68-2.62 (m, 1H), 2.05-1.99 (m, 2H), 1.50-1.38 (m, 2H), 1.35-1.06 (m, 46H), 1.08-1.06 (m, 2H), 0.85-(m, 3H); ³¹P NMR (162 MHz, d₆-DMSO) 149.41, 149.15.

### NHP Study

[1203] NHPs (n=4) were intrathecally administered 37.5 mg lipid-conjugated SNCA-B15 via lumbar infusion at L1 (see Table 9). aCSF was used as a control.

TABLE 9
Lipid-Conjugated SNCA-Targeting RNAi
Oligonucleotide for NHP Study

| | | SEQ | SEQ | SEQ | SEQ |
|---|---|---|---|---|---|
| RNAi | | ID NO | ID NO | ID NO | ID NO |
| Oligonu- | Conju- | (Sense) | (Antisense) | (Sense) | (Antisense) |
| cleotide | gate | Unmodified | | Modified | |
| SNCA-B15 | C₁₆ | 1681 | 1586 | 1682 | 1656 |

[1204] 28 days after administration, CNS tissue was collected to determine the concentration of the oligonucleotide and the SCNA gene expression level. Parkinson's Disease (PD) is a movement disorder characterized by tremors, slowness of movement, stiff muscles, unsteady walk, and/or loss of balance, whereas Multiple Systems Atrophy (MSA) is a rare disorder affecting autonomic functions such as blood pressure, breathing and bladder control, and motor function. Accordingly, CNS tissues associated with PD or MSA were analyzed separately.

[1205] As shown in FIG. 4A, SNCA gene expression was reduced in tissues associated with AD, including the putamen, midbrain tegmentum, substantia nigra, pons, and medulla, with the lipid-conjugated SNCA-B15. SNCA gene expression was determined as described in the above Examples. FIG. 4B shows concentration of lipid-conjugated SNCA-B15 in the tissues after 28 days. These results indicate lipid-conjugated SNCA-targeting oligonucleotides have enhanced potency across tissues associated with PD.

[1206] Likewise, and as shown in FIG. 5A, SNCA gene expression was reduced in tissues associated with MSA, including the putamen, midbrain tegmentum, substantia nigra, pons, cerebellar white matter, medulla, cervical spinal cord, thoracic spinal cord, and lumbar spinal cord with lipid-conjugated SNCA-B15. SNCA gene expression was determined as described in the above Examples. FIG. 5B shows the concentration of lipid-conjugated SNCA-B15 in the tissues after 28 days. These results indicate lipid-conjugated SNCA-targeting oligonucleotides have enhanced potency across tissues associated with MSA.

### SEQUENCE LISTING

[1207] The following nucleic and/or amino acid sequences are referred to in the disclosure and are provided below for reference.

| | | | SEQ |
|---|---|---|---|
| | | | ID |
| Construct | Description | Sequence | NO |
| SNCA-259 | 25mer sense strand | UUCAUGAAAGGACUUUCAAAGGCCA | 1 |
| SNCA-260 | 25mer sense strand | UCAUGAAAGGACUUUCAAAAGCCAA | 2 |
| SNCA-261 | 25mer sense strand | CAUGAAAGGACUUUCAAAGACCAAG | 3 |
| SNCA-262 | 25mer sense strand | AUGAAAGGACUUUCAAAGGACAAGG | 4 |
| SNCA-263 | 25mer sense strand | UGAAAGGACUUUCAAAGGCAAAGGA | 5 |
| SNCA-264 | 25mer sense strand | GAAAGGACUUUCAAAGGCCAAGGAG | 6 |
| SNCA-285 | 25mer sense strand | GGAGGGAGUUGUGGCUGCUACUGAG | 7 |
| SNCA-288 | 25mer sense strand | GGGAGUUGUGGCUGCUGCUAAGAAA | 8 |
| SNCA-289 | 25mer sense strand | GGAGUUGUGGCUGCUGCUGAGAAAA | 9 |
| SNCA-290 | 25mer sense strand | GAGUUGUGGCUGCUGCUGAAAAAAC | 10 |
| SNCA-292 | 25mer sense strand | GUUGUGGCUGCUGCUGAGAAAACCA | 11 |
| SNCA-293 | 25mer sense strand | UUGUGGCUGCUGCUGAGAAAACCAA | 12 |
| SNCA-294 | 25mer sense strand | UGUGGCUGCUGCUGAGAAAACCAAA | 13 |
| SNCA-295 | 25mer sense strand | GUGGCUGCUGCUGAGAAAAACAAAC | 14 |
| SNCA-296 | 25mer sense strand | UGGCUGCUGCUGAGAAAACAAAACA | 15 |
| SNCA-297 | 25mer sense strand | GGCUGCUGCUGAGAAAACCAAACAG | 16 |
| SNCA-407 | 25mer sense strand | CAACAGUGGCUGAGAAGACAAAAGA | 17 |
| SNCA-408 | 25mer sense strand | AACAGUGGCUGAGAAGACCAAAGAG | 18 |
| SNCA-409 | 25mer sense strand | ACAGUGGCUGAGAAGACCAAAGAGC | 19 |
| SNCA-410 | 25mer sense strand | CAGUGGCUGAGAAGACCAAAGAGCA | 20 |
| SNCA-411 | 25mer sense strand | AGUGGCUGAGAAGACCAAAAAGCAA | 21 |
| SNCA-412 | 25mer sense strand | GUGGCUGAGAAGACCAAAGAGCAAG | 22 |
| SNCA-413 | 25mer sense strand | UGGCUGAGAAGACCAAAGAACAAGT | 23 |
| SNCA-414 | 25mer sense strand | GGCUGAGAAGACCAAAGAGAAAGTG | 24 |
| SNCA-415 | 25mer sense strand | GCUGAGAAGACCAAAGAGCAAGUGA | 25 |
| SNCA-416 | 25mer sense strand | CUGAGAAGACCAAAGAGCAAGUGAC | 26 |
| SNCA-417 | 25mer sense strand | UGAGAAGACCAAAGAGCAAAUGACA | 27 |
| SNCA-418 | 25mer sense strand | GAGAAGACCAAAGAGCAAGAGACAA | 28 |
| SNCA-419 | 25mer sense strand | AGAAGACCAAAGAGCAAGUAACAAA | 29 |
| SNCA-420 | 25mer sense strand | GAAGACCAAAGAGCAAGUGACAAAT | 30 |
| SNCA-421 | 25mer sense strand | AAGACCAAAGAGCAAGUGAAAAATG | 31 |
| SNCA-422 | 25mer sense strand | AGACCAAAGAGCAAGUGACAAAUGT | 32 |
| SNCA-423 | 25mer sense strand | GACCAAAGAGCAAGUGACAAAUGTT | 33 |
| SNCA-424 | 25mer sense strand | ACCAAAGAGCAAGUGACAAAUGUTG | 34 |
| SNCA-425 | 25mer sense strand | CCAAAGAGCAAGUGACAAAAGUUGG | 35 |
| SNCA-426 | 25mer sense strand | CAAAGAGCAAGUGACAAAUAUUGGA | 36 |
| SNCA-427 | 25mer sense strand | AAAGAGCAAGUGACAAAUGAUGGAG | 37 |
| SNCA-428 | 25mer sense strand | AAGAGCAAGUGACAAAUGUAGGAGG | 38 |
| SNCA-429 | 25mer sense strand | AGAGCAAGUGACAAAUGUUAGAGGA | 39 |
| SNCA-430 | 25mer sense strand | GAGCAAGUGACAAAUGUUGAAGGAG | 40 |
| SNCA-431 | 25mer sense strand | AGCAAGUGACAAAUGUUGGAGGAGC | 41 |
| SNCA-432 | 25mer sense strand | GCAAGUGACAAAUGUUGGAAGAGCA | 42 |
| SNCA-433 | 25mer sense strand | CAAGUGACAAAUGUUGGAGAAGCAG | 43 |
| SNCA-434 | 25mer sense strand | AAGUGACAAAUGUUGGAGGAGCAGT | 44 |
| SNCA-435 | 25mer sense strand | AGUGACAAAUGUUGGAGGAACAGTG | 45 |
| SNCA-436 | 25mer sense strand | GUGACAAAUGUUGGAGGAGAAGUGG | 46 |
| SNCA-437 | 25mer sense strand | UGACAAAUGUUGGAGGAGCAGUGGT | 47 |
| SNCA-725 | 25mer sense strand | GUACAAGUGCUCAGUUCCAAUGUGC | 48 |
| SNCA-726 | 25mer sense strand | UACAAGUGCUCAGUUCCAAAGUGCC | 49 |
| SNCA-727 | 25mer sense strand | ACAAGUGCUCAGUUCCAAUAUGCCC | 50 |
| SNCA-728 | 25mer sense strand | CAAGUGCUCAGUUCCAAUGAGCCCA | 51 |
| SNCA-729 | 25mer sense strand | AAGUGCUCAGUUCCAAUGUACCCAG | 52 |
| SNCA-730 | 25mer sense strand | AGUGCUCAGUUCCAAUGUGACCAGT | 53 |
| SNCA-731 | 25mer sense strand | GUGCUCAGUUCCAAUGUGCACAGTC | 54 |
| SNCA-732 | 25mer sense strand | UGCUCAGUUCCAAUGUGCCAAGUCA | 55 |
| SNCA-733 | 25mer sense strand | GCUCAGUUCCAAUGUGCCCAGUCAT | 56 |
| SNCA-734 | 25mer sense strand | CUCAGUUCCAAUGUGCCCAAUCATG | 57 |
| SNCA-735 | 25mer sense strand | UCAGUUCCAAUGUGCCCAGACAUGA | 58 |
| SNCA-736 | 25mer sense strand | CAGUUCCAAUGUGCCCAGUAAUGAC | 59 |
| SNCA-737 | 25mer sense strand | AGUUCCAAUGUGCCCAGUCAUGACA | 60 |
| SNCA-738 | 25mer sense strand | GUUCCAAUGUGCCCAGUCAAGACAT | 61 |
| SNCA-739 | 25mer sense strand | UUCCAAUGUGCCCAGUCAUAACATT | 62 |
| SNCA-740 | 25mer sense strand | UCCAAUGUGCCCAGUCAUGACAUTT | 63 |
| SNCA-741 | 25mer sense strand | CCAAUGUGCCCAGUCAUGAAAUUTC | 64 |
| SNCA-742 | 25mer sense strand | CAAUGUGCCCAGUCAUGACAUUUCT | 65 |
| SNCA-790 | 25mer sense strand | AAGUCUUCCAUCAGCAGUGAUUGAA | 66 |
| SNCA-791 | 25mer sense strand | AGUCUUCCAUCAGCAGUGAAUGAAG | 67 |
| SNCA-792 | 25mer sense strand | GUCUUCCAUCAGCAGUGAUAGAAGT | 68 |
| SNCA-938 | 25mer sense strand | AAAACACCUAAGUGACUACAACUTA | 69 |
| SNCA-939 | 25mer sense strand | AAACACCUAAGUGACUACCACUUAT | 70 |
| SNCA-940 | 25mer sense strand | AACACCUAAGUGACUACCAAUUATT | 71 |
| SNCA-941 | 25mer sense strand | ACACCUAAGUGACUACCACAUAUTT | 72 |
| SNCA-942 | 25mer sense strand | CACCUAAGUGACUACCACUAAUUTC | 73 |
| SNCA-943 | 25mer sense strand | ACCUAAGUGACUACCACUUAUUUCT | 74 |
| SNCA-944 | 25mer sense strand | CCUAAGUGACUACCACUUAAUUCTA | 75 |
| SNCA-945 | 25mer sense strand | CUAAGUGACUACCACUUAUAUCUAA | 76 |
| SNCA-946 | 25mer sense strand | UAAGUGACUACCACUUAUUACUAAA | 77 |
| SNCA-947 | 25mer sense strand | AAGUGACUACCACUUAUUUAUAAAT | 78 |
| SNCA-948 | 25mer sense strand | AGUGACUACCACUUAUUUCAAAATC | 79 |
| SNCA-949 | 25mer sense strand | GUGACUACCACUUAUUUCUAAAUCC | 80 |
| SNCA-950 | 25mer sense strand | UGACUACCACUUAUUUCUAAAUCCT | 81 |
| SNCA-951 | 25mer sense strand | GACUACCACUUAUUUCUAAAUCCTC | 82 |
| SNCA-952 | 25mer sense strand | ACUACCACUUAUUUCUAAAACCUCA | 83 |
| SNCA-953 | 25mer sense strand | CUACCACUUAUUUCUAAAUACUCAC | 84 |
| SNCA-954 | 25mer sense strand | UACCACUUAUUUCUAAAUCAUCACT | 85 |
| SNCA- | 25mer sense strand | UUGUGAAAUUUGUUAAUAUAUAUAA | 86 |
| 1081 | | | |
| SNCA- | 25mer sense strand | UGUGAAAUUUGUUAAUAUAAAUAAT | 87 |
| 1082 | | | |
| SNCA- | 25mer sense strand | GUGAAAUUUGUUAAUAUAUAUAATA | 88 |
| 1083 | | | |
| SNCA- | 25mer sense strand | UGAAAUUUGUUAAUAUAUAAAAUAC | 89 |
| 1084 | | | |
| SNCA- | 25mer sense strand | GAAAUUUGUUAAUAUAUAUAAUACT | 90 |
| 1085 | | | |
| SNCA- | 25mer sense strand | ACUUGUGUUUGUAUAUAAAAGGUGA | 91 |
| 1188 | | | |
| SNCA- | 25mer sense strand | CUUGUGUUUGUAUAUAAAUAGUGAG | 92 |
| 1189 | | | |
| SNCA- | 25mer sense strand | UUGUGUUUGUAUAUAAAUGAUGAGA | 93 |
| 1190 | | | |
| SNCA- | 25mer sense strand | UGUGUUUGUAUAUAAAUGGAGAGAA | 94 |
| 1191 | | | |
| SNCA- | 25mer sense strand | GUGUUUGUAUAUAAAUGGUAAGAAT | 95 |
| 1192 | | | |
| SNCA- | 25mer sense strand | UGUUUGUAUAUAAAUGGUGAGAATT | 96 |
| 1193 | | | |
| SNCA-225 | 25mer sense strand | UGUGGUGUAAAGGAAUUCAAUAGCC | 97 |
| SNCA-226 | 25mer sense strand | GUGGUGUAAAGGAAUUCAUAAGCCA | 98 |
| SNCA-227 | 25mer sense strand | UGGUGUAAAGGAAUUCAUUAGCCAT | 99 |
| SNCA-228 | 25mer sense strand | GGUGUAAAGGAAUUCAUUAACCATG | 100 |
| SNCA-229 | 25mer sense strand | GUGUAAAGGAAUUCAUUAGACAUGG | 101 |
| SNCA-230 | 25mer sense strand | UGUAAAGGAAUUCAUUAGCAAUGGA | 102 |
| SNCA-231 | 25mer sense strand | GUAAAGGAAUUCAUUAGCCAUGGAT | 103 |
| SNCA-232 | 25mer sense strand | UAAAGGAAUUCAUUAGCCAAGGATG | 104 |
| SNCA-233 | 25mer sense strand | AAAGGAAUUCAUUAGCCAUAGAUGT | 105 |
| SNCA-234 | 25mer sense strand | AAGGAAUUCAUUAGCCAUGAAUGTA | 106 |
| SNCA-235 | 25mer sense strand | AGGAAUUCAUUAGCCAUGGAUGUAT | 107 |
| SNCA-236 | 25mer sense strand | GGAAUUCAUUAGCCAUGGAAGUATT | 108 |
| SNCA-237 | 25mer sense strand | GAAUUCAUUAGCCAUGGAUAUAUTC | 109 |
| SNCA-238 | 25mer sense strand | AAUUCAUUAGCCAUGGAUGAAUUCA | 110 |
| SNCA-239 | 25mer sense strand | AUUCAUUAGCCAUGGAUGUAUUCAT | 111 |
| SNCA-240 | 25mer sense strand | UUCAUUAGCCAUGGAUGUAAUCATG | 112 |
| SNCA-241 | 25mer sense strand | UCAUUAGCCAUGGAUGUAUACAUGA | 113 |
| SNCA-242 | 25mer sense strand | CAUUAGCCAUGGAUGUAUUAAUGAA | 114 |
| SNCA-243 | 25mer sense strand | AUUAGCCAUGGAUGUAUUCAUGAAA | 115 |
| SNCA-244 | 25mer sense strand | UUAGCCAUGGAUGUAUUCAAGAAAG | 116 |
| SNCA-245 | 25mer sense strand | UAGCCAUGGAUGUAUUCAUAAAAGG | 117 |
| SNCA-246 | 25mer sense strand | AGCCAUGGAUGUAUUCAUGAAAGGA | 118 |
| SNCA-247 | 25mer sense strand | GCCAUGGAUGUAUUCAUGAAAGGAC | 119 |
| SNCA-248 | 25mer sense strand | CCAUGGAUGUAUUCAUGAAAGGACT | 120 |
| SNCA-249 | 25mer sense strand | CAUGGAUGUAUUCAUGAAAAGACTT | 121 |
| SNCA-250 | 25mer sense strand | AUGGAUGUAUUCAUGAAAGAACUTT | 122 |
| SNCA-251 | 25mer sense strand | UGGAUGUAUUCAUGAAAGGACUUTC | 123 |
| SNCA-252 | 25mer sense strand | GGAUGUAUUCAUGAAAGGAAUUUCA | 124 |
| SNCA-253 | 25mer sense strand | GAUGUAUUCAUGAAAGGACAUUCAA | 125 |
| SNCA-254 | 25mer sense strand | AUGUAUUCAUGAAAGGACUAUCAAA | 126 |
| SNCA-256 | 25mer sense strand | GUAUUCAUGAAAGGACUUUAAAAGG | 127 |
| SNCA-330 | 25mer sense strand | AGAAGCAGCAGGAAAGACAAAAGAG | 128 |
| SNCA-335 | 25mer sense strand | CAGCAGGAAAGACAAAAGAAGGUGT | 129 |
| SNCA-337 | 25mer sense strand | GCAGGAAAGACAAAAGAGGAUGUTC | 130 |
| SNCA-341 | 25mer sense strand | GAAAGACAAAAGAGGGUGUACUCTA | 131 |
| SNCA-342 | 25mer sense strand | AAAGACAAAAGAGGGUGUUAUCUAT | 132 |
| SNCA-344 | 25mer sense strand | AGACAAAAGAGGGUGUUCUAUAUGT | 133 |
| SNCA-345 | 25mer sense strand | GACAAAAGAGGGUGUUCUCAAUGTA | 134 |
| SNCA-351 | 25mer sense strand | AGAGGGUGUUCUCUAUGUAAGCUCC | 135 |
| SNCA-353 | 25mer sense strand | AGGGUGUUCUCUAUGUAGGAUCCAA | 136 |
| SNCA-355 | 25mer sense strand | GGUGUUCUCUAUGUAGGCUACAAAA | 137 |
| SNCA-638 | 25mer sense strand | AGGAAGGGUAUCAAGACUAAGAACC | 138 |
| SNCA-641 | 25mer sense strand | AAGGGUAUCAAGACUACGAACCUGA | 139 |
| SNCA-642 | 25mer sense strand | AGGGUAUCAAGACUACGAAACUGAA | 140 |
| SNCA-647 | 25mer sense strand | AUCAAGACUACGAACCUGAAGCCTA | 141 |
| SNCA-648 | 25mer sense strand | UCAAGACUACGAACCUGAAACCUAA | 142 |
| SNCA-650 | 25mer sense strand | AAGACUACGAACCUGAAGCAUAAGA | 143 |
| SNCA-652 | 25mer sense strand | GACUACGAACCUGAAGCCUAAGAAA | 144 |
| SNCA-653 | 25mer sense strand | ACUACGAACCUGAAGCCUAAGAAAT | 145 |
| SNCA-654 | 25mer sense strand | CUACGAACCUGAAGCCUAAAAAATA | 146 |
| SNCA-656 | 25mer sense strand | ACGAACCUGAAGCCUAAGAAAUATC | 147 |
| SNCA-657 | 25mer sense strand | CGAACCUGAAGCCUAAGAAAUAUCT | 148 |
| SNCA-659 | 25mer sense strand | AACCUGAAGCCUAAGAAAUAUCUTT | 149 |
| SNCA-660 | 25mer sense strand | ACCUGAAGCCUAAGAAAUAACUUTG | 150 |
| SNCA-661 | 25mer sense strand | CCUGAAGCCUAAGAAAUAUAUUUGC | 151 |
| SNCA-662 | 25mer sense strand | CUGAAGCCUAAGAAAUAUCAUUGCT | 152 |
| SNCA-663 | 25mer sense strand | UGAAGCCUAAGAAAUAUCUAUGCTC | 153 |
| SNCA-668 | 25mer sense strand | CCUAAGAAAUAUCUUUGCUACCAGT | 154 |
| SNCA-669 | 25mer sense strand | CUAAGAAAUAUCUUUGCUCACAGTT | 155 |
| SNCA-672 | 25mer sense strand | AGAAAUAUCUUUGCUCCCAAUUUCT | 156 |
| SNCA-675 | 25mer sense strand | AAUAUCUUUGCUCCCAGUUACUUGA | 157 |
| SNCA-676 | 25mer sense strand | AUAUCUUUGCUCCCAGUUUAUUGAG | 158 |
| SNCA-689 | 25mer sense strand | CAGUUUCUUGAGAUCUGCUAACAGA | 159 |
| SNCA-724 | 25mer sense strand | UGUACAAGUGCUCAGUUCCAAUGTG | 160 |
| SNCA-744 | 25mer sense strand | AUGUGCCCAGUCAUGACAUAUCUCA | 161 |
| SNCA-745 | 25mer sense strand | UGUGCCCAGUCAUGACAUUACUCAA | 162 |
| SNCA-746 | 25mer sense strand | GUGCCCAGUCAUGACAUUUAUCAAA | 163 |
| SNCA-751 | 25mer sense strand | CAGUCAUGACAUUUCUCAAAGUUTT | 164 |
| SNCA-752 | 25mer sense strand | AGUCAUGACAUUUCUCAAAAUUUTT | 165 |
| SNCA-753 | 25mer sense strand | GUCAUGACAUUUCUCAAAGAUUUTA | 166 |
| SNCA-754 | 25mer sense strand | UCAUGACAUUUCUCAAAGUAUUUAC | 167 |
| SNCA-755 | 25mer sense strand | CAUGACAUUUCUCAAAGUUAUUACA | 168 |
| SNCA-756 | 25mer sense strand | AUGACAUUUCUCAAAGUUUAUACAG | 169 |
| SNCA-757 | 25mer sense strand | UGACAUUUCUCAAAGUUUUAACAGT | 170 |
| SNCA-758 | 25mer sense strand | GACAUUUCUCAAAGUUUUUACAGTG | 171 |
| SNCA-759 | 25mer sense strand | ACAUUUCUCAAAGUUUUUAAAGUGT | 172 |
| SNCA-760 | 25mer sense strand | CAUUUCUCAAAGUUUUUACAGUGTA | 173 |
| SNCA-761 | 25mer sense strand | AUUUCUCAAAGUUUUUACAAUGUAT | 174 |
| SNCA-762 | 25mer sense strand | UUUCUCAAAGUUUUUACAGAGUATC | 175 |
| SNCA-789 | 25mer sense strand | GAAGUCUUCCAUCAGCAGUAAUUGA | 176 |
| SNCA-795 | 25mer sense strand | UUCCAUCAGCAGUGAUUGAAGUATC | 177 |
| SNCA-796 | 25mer sense strand | UCCAUCAGCAGUGAUUGAAAUAUCT | 178 |
| SNCA-797 | 25mer sense strand | CCAUCAGCAGUGAUUGAAGAAUCTG | 179 |
| SNCA-798 | 25mer sense strand | CAUCAGCAGUGAUUGAAGUAUCUGT | 180 |
| SNCA-799 | 25mer sense strand | AUCAGCAGUGAUUGAAGUAACUGTA | 18 |
| SNCA-800 | 25mer sense strand | UCAGCAGUGAUUGAAGUAUAUGUAC | 182 |
| SNCA-801 | 25mer sense strand | CAGCAGUGAUUGAAGUAUCAGUACC | 183 |
| SNCA-802 | 25mer sense strand | AGCAGUGAUUGAAGUAUCUAUACCT | 184 |
| SNCA-803 | 25mer sense strand | GCAGUGAUUGAAGUAUCUGAACCTG | 185 |
| SNCA-804 | 25mer sense strand | CAGUGAUUGAAGUAUCUGUACCUGC | 186 |
| SNCA-805 | 25mer sense strand | AGUGAUUGAAGUAUCUGUAACUGCC | 187 |
| SNCA-809 | 25mer sense strand | AUUGAAGUAUCUGUACCUGACCCCA | 188 |
| SNCA-839 | 25mer sense strand | CAUUUCGGUGCUUCCCUUUAACUGA | 189 |
| SNCA-844 | 25mer sense strand | CGGUGCUUCCCUUUCACUGAAGUGA | 190 |
| SNCA-845 | 25mer sense strand | GGUGCUUCCCUUUCACUGAAGUGAA | 191 |
| SNCA-846 | 25mer sense strand | GUGCUUCCCUUUCACUGAAAUGAAT | 192 |
| SNCA-847 | 25mer sense strand | UGCUUCCCUUUCACUGAAGAGAATA | 193 |
| SNCA-848 | 25mer sense strand | GCUUCCCUUUCACUGAAGUAAAUAC | 194 |
| SNCA-849 | 25mer sense strand | CUUCCCUUUCACUGAAGUGAAUACA | 195 |
| SNCA-850 | 25mer sense strand | UUCCCUUUCACUGAAGUGAAUACAT | 196 |
| SNCA-851 | 25mer sense strand | UCCCUUUCACUGAAGUGAAAACATG | 197 |
| SNCA-852 | 25mer sense strand | CCCUUUCACUGAAGUGAAUACAUGG | 198 |
| SNCA-853 | 25mer sense strand | CCUUUCACUGAAGUGAAUAAAUGGT | 199 |
| SNCA-854 | 25mer sense strand | CUUUCACUGAAGUGAAUACAUGGTA | 200 |
| SNCA-855 | 25mer sense strand | UUUCACUGAAGUGAAUACAAGGUAG | 201 |
| SNCA-856 | 25mer sense strand | UUCACUGAAGUGAAUACAUAGUAGC | 202 |
| SNCA-857 | 25mer sense strand | UCACUGAAGUGAAUACAUGAUAGCA | 203 |
| SNCA-858 | 25mer sense strand | CACUGAAGUGAAUACAUGGAAGCAG | 204 |
| SNCA-859 | 25mer sense strand | ACUGAAGUGAAUACAUGGUAGCAGG | 205 |
| SNCA-860 | 25mer sense strand | CUGAAGUGAAUACAUGGUAACAGGG | 206 |
| SNCA-861 | 25mer sense strand | UGAAGUGAAUACAUGGUAGAAGGGT | 207 |
| SNCA-863 | 25mer sense strand | AAGUGAAUACAUGGUAGCAAGGUCT | 208 |
| SNCA-864 | 25mer sense strand | AGUGAAUACAUGGUAGCAGAGUCTT | 209 |
| SNCA-865 | 25mer sense strand | GUGAAUACAUGGUAGCAGGAUCUTT | 210 |
| SNCA-867 | 25mer sense strand | GAAUACAUGGUAGCAGGGUAUUUGT | 211 |
| SNCA-868 | 25mer sense strand | AAUACAUGGUAGCAGGGUCAUUGTG | 212 |
| SNCA-875 | 25mer sense strand | GGUAGCAGGGUCUUUGUGUACUGTG | 213 |
| SNCA-881 | 25mer sense strand | AGGGUCUUUGUGUGCUGUGAAUUTT | 214 |
| SNCA-883 | 25mer sense strand | GGUCUUUGUGUGCUGUGGAAUUUGT | 215 |
| SNCA-889 | 25mer sense strand | UGUGUGCUGUGGAUUUUGUAGCUTC | 216 |
| SNCA-890 | 25mer sense strand | GUGUGCUGUGGAUUUUGUGACUUCA | 217 |
| SNCA-891 | 25mer sense strand | UGUGCUGUGGAUUUUGUGGAUUCAA | 218 |
| SNCA-892 | 25mer sense strand | GUGCUGUGGAUUUUGUGGCAUCAAT | 219 |
| SNCA-893 | 25mer sense strand | UGCUGUGGAUUUUGUGGCUACAATC | 220 |
| SNCA-894 | 25mer sense strand | GCUGUGGAUUUUGUGGCUUAAAUCT | 221 |
| SNCA-895 | 25mer sense strand | CUGUGGAUUUUGUGGCUUCAAUCTA | 222 |
| SNCA-897 | 25mer sense strand | GUGGAUUUUGUGGCUUCAAACUACG | 223 |
| SNCA-898 | 25mer sense strand | UGGAUUUUGUGGCUUCAAUAUACGA | 224 |
| SNCA-900 | 25mer sense strand | GAUUUUGUGGCUUCAAUCUACGATG | 225 |
| SNCA-901 | 25mer sense strand | AUUUUGUGGCUUCAAUCUAAGAUGT | 226 |
| SNCA-956 | 25mer sense strand | CCACUUAUUUCUAAAUCCUAACUAT | 227 |
| SNCA-957 | 25mer sense strand | CACUUAUUUCUAAAUCCUCACUATT | 228 |
| SNCA-958 | 25mer sense strand | ACUUAUUUCUAAAUCCUCAAUAUTT | 229 |
| SNCA-959 | 25mer sense strand | CUUAUUUCUAAAUCCUCACAAUUTT | 230 |
| SNCA-961 | 25mer sense strand | UAUUUCUAAAUCCUCACUAAUUUTT | 231 |
| SNCA-962 | 25mer sense strand | AUUUCUAAAUCCUCACUAUAUUUTT | 232 |
| SNCA-963 | 25mer sense strand | UUUCUAAAUCCUCACUAUUAUUUTG | 233 |
| SNCA-964 | 25mer sense strand | UUCUAAAUCCUCACUAUUUAUUUGT | 234 |
| SNCA-965 | 25mer sense strand | UCUAAAUCCUCACUAUUUUAUUGTT | 235 |
| SNCA-966 | 25mer sense strand | CUAAAUCCUCACUAUUUUUAUGUTG | 236 |
| SNCA-967 | 25mer sense strand | UAAAUCCUCACUAUUUUUUAGUUGC | 237 |
| SNCA-968 | 25mer sense strand | AAAUCCUCACUAUUUUUUUAUUGCT | 238 |
| SNCA-969 | 25mer sense strand | AAUCCUCACUAUUUUUUUGAUGCTG | 239 |
| SNCA-970 | 25mer sense strand | AUCCUCACUAUUUUUUUGUAGCUGT | 240 |
| SNCA-971 | 25mer sense strand | UCCUCACUAUUUUUUUGUUACUGTT | 241 |
| SNCA-972 | 25mer sense strand | CCUCACUAUUUUUUUGUUGAUGUTG | 242 |
| SNCA-973 | 25mer sense strand | CUCACUAUUUUUUUGUUGCAGUUGT | 243 |
| SNCA-974 | 25mer sense strand | UCACUAUUUUUUUGUUGCUAUUGTT | 244 |
| SNCA-975 | 25mer sense strand | CACUAUUUUUUUGUUGCUGAUGUTC | 245 |
| SNCA-976 | 25mer sense strand | ACUAUUUUUUUGUUGCUGUAGUUCA | 246 |
| SNCA-977 | 25mer sense strand | CUAUUUUUUUGUUGCUGUUAUUCAG | 247 |
| SNCA-978 | 25mer sense strand | UAUUUUUUUGUUGCUGUUGAUCAGA | 248 |
| SNCA-979 | 25mer sense strand | AUUUUUUUGUUGCUGUUGUACAGAA | 249 |
| SNCA-980 | 25mer sense strand | UUUUUUUGUUGCUGUUGUUAAGAAG | 250 |
| SNCA-981 | 25mer sense strand | UUUUUUGUUGCUGUUGUUCAGAAGT | 251 |
| SNCA-982 | 25mer sense strand | UUUUUGUUGCUGUUGUUCAAAAGTT | 252 |
| SNCA-983 | 25mer sense strand | UUUUGUUGCUGUUGUUCAGAAGUTG | 253 |
| SNCA-984 | 25mer sense strand | UUUGUUGCUGUUGUUCAGAAGUUGT | 254 |
| SNCA-985 | 25mer sense strand | UUGUUGCUGUUGUUCAGAAAUUGTT | 255 |
| SNCA-986 | 25mer sense strand | UGUUGCUGUUGUUCAGAAGAUGUTA | 256 |
| SNCA-987 | 25mer sense strand | GUUGCUGUUGUUCAGAAGUAGUUAG | 257 |
| SNCA-988 | 25mer sense strand | UUGCUGUUGUUCAGAAGUUAUUAGT | 258 |
| SNCA-989 | 25mer sense strand | UGCUGUUGUUCAGAAGUUGAUAGTG | 259 |
| SNCA-990 | 25mer sense strand | GCUGUUGUUCAGAAGUUGUAAGUGA | 260 |
| SNCA-991 | 25mer sense strand | CUGUUGUUCAGAAGUUGUUAGUGAT | 261 |
| SNCA-992 | 25mer sense strand | UGUUGUUCAGAAGUUGUUAAUGATT | 262 |
| SNCA-993 | 25mer sense strand | GUUGUUCAGAAGUUGUUAGAGAUTT | 263 |
| SNCA-994 | 25mer sense strand | UUGUUCAGAAGUUGUUAGUAAUUTG | 264 |
| SNCA-995 | 25mer sense strand | UGUUCAGAAGUUGUUAGUGAUUUGC | 265 |
| SNCA-996 | 25mer sense strand | GUUCAGAAGUUGUUAGUGAAUUGCT | 266 |
| SNCA-997 | 25mer sense strand | UUCAGAAGUUGUUAGUGAUAUGCTA | 267 |
| SNCA-998 | 25mer sense strand | UCAGAAGUUGUUAGUGAUUAGCUAT | 268 |
| SNCA-999 | 25mer sense strand | CAGAAGUUGUUAGUGAUUUACUATC | 269 |
| SNCA- | 25mer sense strand | AGAAGUUGUUAGUGAUUUGAUAUCA | 270 |
| 1000 | | | |
| SNCA- | 25mer sense strand | GAAGUUGUUAGUGAUUUGCAAUCAT | 271 |
| 1001 | | | |
| SNCA- | 25mer sense strand | AAGUUGUUAGUGAUUUGCUAUCATA | 272 |
| 1002 | | | |
| SNCA- | 25mer sense strand | AGUUGUUAGUGAUUUGCUAACAUAT | 273 |
| 1003 | | | |
| SNCA- | 25mer sense strand | GUUGUUAGUGAUUUGCUAUAAUATA | 274 |
| 1004 | | | |
| SNCA- | 25mer sense strand | UUGUUAGUGAUUUGCUAUCAUAUAT | 275 |
| 1005 | | | |
| SNCA- | 25mer sense strand | AUUAUAAGAUUUUUAGGUGACUUTT | 276 |
| 1028 | | | |
| SNCA- | 25mer sense strand | UUAUAAGAUUUUUAGGUGUAUUUTA | 277 |
| 1029 | | | |
| SNCA- | 25mer sense strand | UAUAAGAUUUUUAGGUGUCAUUUAA | 278 |
| 1030 | | | |
| SNCA- | 25mer sense strand | AUAAGAUUUUUAGGUGUCUAUUAAT | 279 |
| 1031 | | | |
| SNCA- | 25mer sense strand | UAAGAUUUUUAGGUGUCUUAUAATG | 280 |
| 1032 | | | |
| SNCA- | 25mer sense strand | AAGAUUUUUAGGUGUCUUUAAAUGA | 281 |
| 1033 | | | |
| SNCA- | 25mer sense strand | AGAUUUUUAGGUGUCUUUUAAUGAT | 282 |
| 1034 | | | |
| SNCA- | 25mer sense strand | GAUUUUUAGGUGUCUUUUAAUGATA | 283 |
| 1035 | | | |
| SNCA- | 25mer sense strand | AUUUUUAGGUGUCUUUUAAAGAUAC | 284 |
| 1036 | | | |
| SNCA- | 25mer sense strand | UUUUUAGGUGUCUUUUAAUAAUACT | 285 |
| 1037 | | | |
| SNCA- | 25mer sense strand | UUUUAGGUGUCUUUUAAUGAUACTG | 286 |
| 1038 | | | |
| SNCA- | 25mer sense strand | UUUAGGUGUCUUUUAAUGAAACUGT | 287 |
| 1039 | | | |
| SNCA- | 25mer sense strand | UUAGGUGUCUUUUAAUGAUACUGTC | 288 |
| 1040 | | | |
| SNCA- | 25mer sense strand | UAGGUGUCUUUUAAUGAUAAUGUCT | 289 |
| 1041 | | | |
| SNCA- | 25mer sense strand | AGGUGUCUUUUAAUGAUACAGUCTA | 290 |
| 1042 | | | |
| SNCA- | 25mer sense strand | GGUGUCUUUUAAUGAUACUAUCUAA | 291 |
| 1043 | | | |
| SNCA- | 25mer sense strand | GUGUCUUUUAAUGAUACUGACUAAG | 292 |
| 1044 | | | |
| SNCA- | 25mer sense strand | UGUCUUUUAAUGAUACUGUAUAAGA | 293 |
| 1045 | | | |
| SNCA- | 25mer sense strand | GUCUUUUAAUGAUACUGUCAAAGAA | 294 |
| 1046 | | | |
| SNCA- | 25mer sense strand | UCUUUUAAUGAUACUGUCUAAGAAT | 295 |
| 1047 | | | |
| SNCA- | 25mer sense strand | CUUUUAAUGAUACUGUCUAAGAATA | 296 |
| 1048 | | | |
| SNCA- | 25mer sense strand | UUUUAAUGAUACUGUCUAAAAAUAA | 297 |
| 1049 | | | |
| SNCA- | 25mer sense strand | UUUAAUGAUACUGUCUAAGAAUAAT | 298 |
| 1050 | | | |
| SNCA- | 25mer sense strand | UUAAUGAUACUGUCUAAGAAUAATG | 299 |
| 1051 | | | |
| SNCA- | 25mer sense strand | UAAUGAUACUGUCUAAGAAAAAUGA | 300 |
| 1052 | | | |
| SNCA- | 25mer sense strand | AAUGAUACUGUCUAAGAAUAAUGAC | 301 |
| 1053 | | | |
| SNCA- | 25mer sense strand | AUGAUACUGUCUAAGAAUAAUGACG | 302 |
| 1054 | | | |
| SNCA- | 25mer sense strand | UGAUACUGUCUAAGAAUAAAGACGT | 303 |
| 1055 | | | |
| SNCA- | 25mer sense strand | GAUACUGUCUAAGAAUAAUAACGTA | 304 |
| 1056 | | | |
| SNCA- | 25mer sense strand | AUACUGUCUAAGAAUAAUGACGUAT | 305 |
| 1057 | | | |
| SNCA- | 25mer sense strand | UACUGUCUAAGAAUAAUGAAGUATT | 306 |
| 1058 | | | |
| SNCA- | 25mer sense strand | GUAUUGUGAAAUUUGUUAAAAUATA | 307 |
| 1078 | | | |
| SNCA- | 25mer sense strand | UAUUGUGAAAUUUGUUAAUAUAUAT | 308 |
| 1079 | | | |
| SNCA- | 25mer sense strand | AUUGUGAAAUUUGUUAAUAAAUATA | 309 |
| 1080 | | | |
| SNCA- | 25mer sense strand | AAAUUUGUUAAUAUAUAUAAUACTT | 310 |
| 1086 | | | |
| SNCA- | 25mer sense strand | AAUUUGUUAAUAUAUAUAAAACUTA | 311 |
| 1087 | | | |
| SNCA- | 25mer sense strand | AUUUGUUAAUAUAUAUAAUACUUAA | 312 |
| 1088 | | | |
| SNCA- | 25mer sense strand | UUUGUUAAUAUAUAUAAUAAUUAAA | 313 |
| 1089 | | | |
| SNCA- | 25mer sense strand | UUGUUAAUAUAUAUAAUACAUAAAA | 314 |
| 1090 | | | |
| SNCA- | 25mer sense strand | UGUUAAUAUAUAUAAUACUAAAAAA | 315 |
| 1091 | | | |
| SNCA- | 25mer sense strand | GUUAAUAUAUAUAAUACUUAAAAAT | 316 |
| 1092 | | | |
| SNCA- | 25mer sense strand | UUAAUAUAUAUAAUACUUAAAAATA | 317 |
| 1093 | | | |
| SNCA- | 25mer sense strand | UAUGUGAGCAUGAAACUAUACACCT | 318 |
| 1116 | | | |
| SNCA- | 25mer sense strand | AUGUGAGCAUGAAACUAUGAACCTA | 319 |
| 1117 | | | |
| SNCA- | 25mer sense strand | GUGAGCAUGAAACUAUGCAACUATA | 320 |
| 1119 | | | |
| SNCA- | 25mer sense strand | UGAGCAUGAAACUAUGCACAUAUAA | 321 |
| 1120 | | | |
| SNCA- | 25mer sense strand | GAGCAUGAAACUAUGCACCAAUAAA | 322 |
| 1121 | | | |
| SNCA- | 25mer sense strand | AGCAUGAAACUAUGCACCUAUAAAT | 323 |
| 1122 | | | |
| SNCA- | 25mer sense strand | GCAUGAAACUAUGCACCUAAAAATA | 324 |
| 1123 | | | |
| SNCA- | 25mer sense strand | CAUGAAACUAUGCACCUAUAAAUAC | 325 |
| 1124 | | | |
| SNCA- | 25mer sense strand | AUGAAACUAUGCACCUAUAAAUACT | 326 |
| 1125 | | | |
| SNCA- | 25mer sense strand | UGAAACUAUGCACCUAUAAAUACTA | 327 |
| 1126 | | | |
| SNCA- | 25mer sense strand | GAAACUAUGCACCUAUAAAAACUAA | 328 |
| 1127 | | | |
| SNCA- | 25mer sense strand | AAACUAUGCACCUAUAAAUACUAAA | 329 |
| 1128 | | | |
| SNCA- | 25mer sense strand | AACUAUGCACCUAUAAAUAAUAAAT | 330 |
| 1129 | | | |
| SNCA- | 25mer sense strand | ACUAUGCACCUAUAAAUACAAAATA | 331 |
| 1130 | | | |
| SNCA- | 25mer sense strand | CUAUGCACCUAUAAAUACUAAAUAT | 332 |
| 1131 | | | |
| SNCA- | 25mer sense strand | UAUGCACCUAUAAAUACUAAAUATG | 333 |
| 1132 | | | |
| SNCA- | 25mer sense strand | AUGCACCUAUAAAUACUAAAUAUGA | 334 |
| 1133 | | | |
| SNCA- | 25mer sense strand | GUUUGUAUAUAAAUGGUGAAAAUTA | 335 |
| 1194 | | | |
| SNCA- | 25mer sense strand | UUUGUAUAUAAAUGGUGAGAAUUAA | 336 |
| 1195 | | | |
| SNCA- | 25mer sense strand | UUGUAUAUAAAUGGUGAGAAUUAAA | 337 |
| 1196 | | | |
| SNCA- | 25mer sense strand | UGUAUAUAAAUGGUGAGAAAUAAAA | 338 |
| 1197 | | | |
| SNCA- | 25mer sense strand | GUAUAUAAAUGGUGAGAAUAAAAAT | 339 |
| 1198 | | | |
| SNCA- | 25mer sense strand | UAUAUAAAUGGUGAGAAUUAAAATA | 340 |
| 1199 | | | |
| SNCA- | 25mer sense strand | AUAUAAAUGGUGAGAAUUAAAAUAA | 341 |
| 1200 | | | |
| SNCA- | 25mer sense strand | UAUAAAUGGUGAGAAUUAAAAUAAA | 342 |
| 1201 | | | |
| SNCA- | 25mer sense strand | AUAAAUGGUGAGAAUUAAAAUAAAA | 343 |
| 1202 | | | |
| SNCA- | 25mer sense strand | UAAAUGGUGAGAAUUAAAAAAAAAC | 344 |
| 1203 | | | |
| SNCA- | 25mer sense strand | AAAUGGUGAGAAUUAAAAUAAAACG | 345 |
| 1204 | | | |
| SNCA- | 25mer sense strand | AAUGGUGAGAAUUAAAAUAAAACGT | 346 |
| 1205 | | | |
| SNCA- | 25mer sense strand | AUGGUGAGAAUUAAAAUAAAACGTT | 347 |
| 1206 | | | |
| SNCA- | 25mer sense strand | UGGUGAGAAUUAAAAUAAAACGUTA | 348 |
| 1207 | | | |
| SNCA- | 25mer sense strand | GGUGAGAAUUAAAAUAAAAAGUUAT | 349 |
| 1208 | | | |
| SNCA- | 25mer sense strand | UUAUUUUUAUCCCAUCUCAAUUUAA | 350 |
| 1250 | | | |
| SNCA- | 25mer sense strand | AUUUUUAUCCCAUCUCACUAUAATA | 351 |
| 1252 | | | |
| SNCA- | 25mer sense strand | UUUUUAUCCCAUCUCACUUAAAUAA | 352 |
| 1253 | | | |
| SNCA- | 25mer sense strand | UUUUAUCCCAUCUCACUUUAAUAAT | 353 |
| 1254 | | | |
| SNCA- | 25mer sense strand | UUUAUCCCAUCUCACUUUAAUAATA | 354 |
| 1255 | | | |
| SNCA- | 25mer sense strand | UUAUCCCAUCUCACUUUAAAAAUAA | 355 |
| 1256 | | | |
| SNCA- | 25mer sense strand | UAUCCCAUCUCACUUUAAUAAUAAA | 356 |
| 1257 | | | |
| SNCA- | 25mer sense strand | AUCCCAUCUCACUUUAAUAAUAAAA | 357 |
| 1258 | | | |
| SNCA- | 25mer sense strand | UCCCAUCUCACUUUAAUAAAAAAAA | 358 |
| 1259 | | | |
| SNCA- | 25mer sense strand | CCCAUCUCACUUUAAUAAUAAAAAT | 359 |
| 1260 | | | |
| SNCA- | 25mer sense strand | CCAUCUCACUUUAAUAAUAAAAATC | 360 |
| 1261 | | | |
| SNCA- | 25mer sense strand | CAUCUCACUUUAAUAAUAAAAAUCA | 361 |
| 1262 | | | |
| SNCA- | 25mer sense strand | AUCUCACUUUAAUAAUAAAAAUCAT | 362 |
| 1263 | | | |
| SNCA- | 25mer sense strand | UCUCACUUUAAUAAUAAAAAUCATG | 363 |
| 1264 | | | |
| SNCA- | 25mer sense strand | CUCACUUUAAUAAUAAAAAACAUGC | 364 |
| 1265 | | | |
| SNCA- | 25mer sense strand | UCACUUUAAUAAUAAAAAUAAUGCT | 365 |
| 1266 | | | |
| SNCA- | 25mer sense strand | CACUUUAAUAAUAAAAAUCAUGCTT | 366 |
| 1267 | | | |
| SNCA- | 25mer sense strand | AUUUGAAGAAGGAGGAAUUAUAGAA | 367 |
| 1351 | | | |
| SNCA- | 25mer sense strand | GAAUUUUAGAAGAGGUAGAAAAAAT | 368 |
| 1365 | | | |
| SNCA- | 25mer sense strand | AGAAGAGGUAGAGAAAAUGAAACAT | 369 |
| 1372 | | | |
| SNCA- | 25mer sense strand | GAAGAGGUAGAGAAAAUGGAACATT | 370 |
| 1373 | | | |
| SNCA- | 25mer sense strand | AAGAGGUAGAGAAAAUGGAACAUTA | 37 |
| 1374 | | | |
| SNCA- | 25mer sense strand | AGAGGUAGAGAAAAUGGAAAAUUAA | 372 |
| 1375 | | | |
| SNCA- | 25mer sense strand | GAGGUAGAGAAAAUGGAACAUUAAC | 373 |
| 1376 | | | |
| SNCA- | 25mer sense strand | AGGUAGAGAAAAUGGAACAAUAACC | 374 |
| 1377 | | | |
| SNCA- | 25mer sense strand | GUAGAGAAAAUGGAACAUUAACCCT | 375 |
| 1379 | | | |
| SNCA- | 25mer sense strand | UAGAGAAAAUGGAACAUUAACCCTA | 376 |
| 1380 | | | |
| SNCA- | 25mer sense strand | AGAGAAAAUGGAACAUUAAACCUAC | 377 |
| 1381 | | | |
| SNCA- | 25mer sense strand | GAGAAAAUGGAACAUUAACACUACA | 378 |
| 1382 | | | |
| SNCA- | 25mer sense strand | AGAAAAUGGAACAUUAACCAUACAC | 379 |
| 1383 | | | |
| SNCA- | 25mer sense strand | GAAAAUGGAACAUUAACCCAACACT | 380 |
| 1384 | | | |
| SNCA- | 25mer sense strand | AAAAUGGAACAUUAACCCUACACTC | 381 |
| 1385 | | | |
| SNCA- | 25mer sense strand | AUGGAACAUUAACCCUACAAUCGGA | 382 |
| 1388 | | | |
| SNCA- | 25mer sense strand | ACUGCCAGAAGUGUGUUUUAGUATG | 383 |
| 1428 | | | |
| SNCA- | 25mer sense strand | CUGCCAGAAGUGUGUUUUGAUAUGC | 384 |
| 1429 | | | |
| SNCA- | 27mer antisense | UGGCCUUUGAAAGUCCUUUCAUGAAU | 385 |
| 259 | strand | A | |
| SNCA- | 27mer antisense | UUGGCUUUUGAAAGUCCUUUCAUGAA | 386 |
| 260 | strand | U | |
| SNCA-261 | 27mer antisense | CUUGGUCUUUGAAAGUCCUUUCAUGA | 387 |
| | strand | A | |
| SNCA-262 | 27mer antisense | CCUUGUCCUUUGAAAGUCCUUUCAUG | 388 |
| | strand | A | |
| SNCA-263 | 27mer antisense | UCCUUUGCCUUUGAAAGUCCUUUCAU | 389 |
| | strand | G | |
| SNCA-264 | 27mer antisense | CUCCUUGGCCUUUGAAAGUCCUUUCA | 390 |
| | strand | U | |
| SNCA-285 | 27mer antisense | CUCAGUAGCAGCCACAACUCCCUCCUU | 391 |
| | strand | | |
| SNCA-288 | 27mer antisense | UUUCUUAGCAGCAGCCACAACUCCCUC | 392 |
| | strand | | |
| SNCA-289 | 27mer antisense | UUUUCUCAGCAGCAGCCACAACUCCCU | 393 |
| | strand | | |
| SNCA-290 | 27mer antisense | GUUUUUUCAGCAGCAGCCACAACUCCC | 394 |
| | strand | | |
| SNCA-292 | 27mer antisense | UGGUUUUCUCAGCAGCAGCCACAACU | 395 |
| | strand | C | |
| SNCA-293 | 27mer antisense | UUGGUUUUCUCAGCAGCAGCCACAAC | 396 |
| | strand | U | |
| SNCA-294 | 27mer antisense | UUUGGUUUUCUCAGCAGCAGCCACAA | 397 |
| | strand | C | |
| SNCA-295 | 27mer antisense | GUUUGUUUUUCUCAGCAGCAGCCACA | 398 |
| | strand | A | |
| SNCA-296 | 27mer antisense | UGUUUUGUUUUCUCAGCAGCAGCCAC | 399 |
| | strand | A | |
| SNCA-297 | 27mer antisense | CUGUUUGGUUUUCUCAGCAGCAGCCA | 400 |
| | strand | C | |
| SNCA-407 | 27mer antisense | UCUUUUGUCUUCUCAGCCACUGUUGC | 401 |
| | strand | C | |
| SNCA-408 | 27mer antisense | CUCUUUGGUCUUCUCAGCCACUGUUG | 402 |
| | strand | C | |
| SNCA-409 | 27mer antisense | GCUCUUUGGUCUUCUCAGCCACUGUU | 403 |
| | strand | G | |
| SNCA-410 | 27mer antisense | UGCUCUUUGGUCUUCUCAGCCACUGU | 404 |
| | strand | U | |
| SNCA-411 | 27mer antisense | UUGCUUUUUGGUCUUCUCAGCCACUG | 405 |
| | strand | U | |
| SNCA-412 | 27mer antisense | CUUGCUCUUUGGUCUUCUCAGCCACU | 406 |
| | strand | G | |
| SNCA-413 | 27mer antisense | ACUUGUUCUUUGGUCUUCUCAGCCAC | 407 |
| | strand | U | |
| SNCA-414 | 27mer antisense | CACUUUCUCUUUGGUCUUCUCAGCCAC | 408 |
| | strand | | |
| SNCA-415 | 27mer antisense | UCACUUGCUCUUUGGUCUUCUCAGCC | 409 |
| | strand | A | |
| SNCA-416 | 27mer antisense | GUCACUUGCUCUUUGGUCUUCUCAGC | 410 |
| | strand | C | |
| SNCA-417 | 27mer antisense | UGUCAUUUGCUCUUUGGUCUUCUCAG | 411 |
| | strand | C | |
| SNCA-418 | 27mer antisense | UUGUCUCUUGCUCUUUGGUCUUCUCA | 412 |
| | strand | G | |
| SNCA-419 | 27mer antisense | UUUGUUACUUGCUCUUUGGUCUUCUC | 413 |
| | strand | A | |
| SNCA-420 | 27mer antisense | AUUUGUCACUUGCUCUUUGGUCUUCU | 414 |
| | strand | C | |
| SNCA-421 | 27mer antisense | CAUUUUUCACUUGCUCUUUGGUCUUC | 415 |
| | strand | U | |
| SNCA-422 | 27mer antisense | ACAUUUGUCACUUGCUCUUUGGUCUU | 416 |
| | strand | C | |
| SNCA-423 | 27mer antisense | AACAUUUGUCACUUGCUCUUUGGUCU | 417 |
| | strand | U | |
| SNCA-424 | 27mer antisense | CAACAUUUGUCACUUGCUCUUUGGUC | 418 |
| | strand | U | |
| SNCA-425 | 27mer antisense | CCAACUUUUGUCACUUGCUCUUUGGU | 419 |
| | strand | C | |
| SNCA-426 | 27mer antisense | UCCAAUAUUUGUCACUUGCUCUUUGG | 420 |
| | strand | U | |
| SNCA-427 | 27mer antisense | CUCCAUCAUUUGUCACUUGCUCUUUG | 421 |
| | strand | G | |
| SNCA-428 | 27mer antisense | CCUCCUACAUUUGUCACUUGCUCUUU | 422 |
| | strand | G | |
| SNCA-429 | 27mer antisense | UCCUCUAACAUUUGUCACUUGCUCUU | 423 |
| | strand | U | |
| SNCA-430 | 27mer antisense | CUCCUUCAACAUUUGUCACUUGCUCU | 424 |
| | strand | U | |
| SNCA-431 | 27mer antisense | GCUCCUCCAACAUUUGUCACUUGCUCU | 425 |
| | strand | | |
| SNCA-432 | 27mer antisense | UGCUCUUCCAACAUUUGUCACUUGCU | 426 |
| | strand | C | |
| SNCA-433 | 27mer antisense | CUGCUUCUCCAACAUUUGUCACUUGC | 427 |
| | strand | U | |
| SNCA-434 | 27mer antisense | ACUGCUCCUCCAACAUUUGUCACUUGC | 428 |
| | strand | | |
| SNCA-435 | 27mer antisense | CACUGUUCCUCCAACAUUUGUCACUU | 429 |
| | strand | G | |
| SNCA-436 | 27mer antisense | CCACUUCUCCUCCAACAUUUGUCACUU | 430 |
| | strand | | |
| SNCA-437 | 27mer antisense | ACCACUGCUCCUCCAACAUUUGUCACU | 431 |
| | strand | | |
| SNCA-725 | 27mer antisense | GCACAUUGGAACUGAGCACUUGUACA | 432 |
| | strand | G | |
| SNCA-726 | 27mer antisense | GGCACUUUGGAACUGAGCACUUGUAC | 433 |
| | strand | A | |
| SNCA-727 | 27mer antisense | GGGCAUAUUGGAACUGAGCACUUGUA | 434 |
| | strand | C | |
| SNCA-728 | 27mer antisense | UGGGCUCAUUGGAACUGAGCACUUGU | 435 |
| | strand | A | |
| SNCA-729 | 27mer antisense | CUGGGUACAUUGGAACUGAGCACUUG | 436 |
| | strand | U | |
| SNCA-730 | 27mer antisense | ACUGGUCACAUUGGAACUGAGCACUU | 437 |
| | strand | G | |
| SNCA-731 | 27mer antisense | GACUGUGCACAUUGGAACUGAGCACU | 438 |
| | strand | U | |
| SNCA-732 | 27mer antisense | UGACUUGGCACAUUGGAACUGAGCAC | 439 |
| | strand | U | |
| SNCA-733 | 27mer antisense | AUGACUGGGCACAUUGGAACUGAGCA | 440 |
| | strand | C | |
| SNCA-734 | 27mer antisense | CAUGAUUGGGCACAUUGGAACUGAGC | 44 |
| | strand | A | |
| SNCA-735 | 27mer antisense | UCAUGUCUGGGCACAUUGGAACUGAG | 442 |
| | strand | C | |
| SNCA-736 | 27mer antisense | GUCAUUACUGGGCACAUUGGAACUGA | 443 |
| | strand | G | |
| SNCA-737 | 27mer antisense | UGUCAUGACUGGGCACAUUGGAACUG | 444 |
| | strand | A | |
| SNCA-738 | 27mer antisense | AUGUCUUGACUGGGCACAUUGGAACU | 445 |
| | strand | G | |
| SNCA-739 | 27mer antisense | AAUGUUAUGACUGGGCACAUUGGAAC | 446 |
| | strand | U | |
| SNCA-740 | 27mer antisense | AAAUGUCAUGACUGGGCACAUUGGAA | 447 |
| | strand | C | |
| SNCA-741 | 27mer antisense | GAAAUUUCAUGACUGGGCACAUUGGA | 448 |
| | strand | A | |
| SNCA-742 | 27mer antisense | AGAAAUGUCAUGACUGGGCACAUUGG | 449 |
| | strand | A | |
| SNCA-790 | 27mer antisense | UUCAAUCACUGCUGAUGGAAGACUUC | 450 |
| | strand | G | |
| SNCA-791 | 27mer antisense | CUUCAUUCACUGCUGAUGGAAGACUU | 451 |
| | strand | C | |
| SNCA-792 | 27mer antisense | ACUUCUAUCACUGCUGAUGGAAGACU | 452 |
| | strand | U | |
| SNCA-938 | 27mer antisense | UAAGUUGUAGUCACUUAGGUGUUUUU | 453 |
| | strand | A | |
| SNCA-939 | 27mer antisense | AUAAGUGGUAGUCACUUAGGUGUUUU | 454 |
| | strand | U | |
| SNCA-940 | 27mer antisense | AAUAAUUGGUAGUCACUUAGGUGUUU | 455 |
| | strand | U | |
| SNCA-941 | 27mer antisense | AAAUAUGUGGUAGUCACUUAGGUGUU | 456 |
| | strand | U | |
| SNCA-942 | 27mer antisense | GAAAUUAGUGGUAGUCACUUAGGUGU | 457 |
| | strand | U | |
| SNCA-943 | 27mer antisense | AGAAAUAAGUGGUAGUCACUUAGGUG | 458 |
| | strand | U | |
| SNCA-944 | 27mer antisense | UAGAAUUAAGUGGUAGUCACUUAGGU | 459 |
| | strand | G | |
| SNCA-945 | 27mer antisense | UUAGAUAUAAGUGGUAGUCACUUAGG | 460 |
| | strand | U | |
| SNCA-946 | 27mer antisense | UUUAGUAAUAAGUGGUAGUCACUUAG | 461 |
| | strand | G | |
| SNCA-947 | 27mer antisense | AUUUAUAAAUAAGUGGUAGUCACUUA | 462 |
| | strand | G | |
| SNCA-948 | 27mer antisense | GAUUUUGAAAUAAGUGGUAGUCACUU | 463 |
| | strand | A | |
| SNCA-949 | 27mer antisense | GGAUUUAGAAAUAAGUGGUAGUCACU | 464 |
| | strand | U | |
| SNCA-950 | 27mer antisense | AGGAUUUAGAAAUAAGUGGUAGUCAC | 465 |
| | strand | U | |
| SNCA-951 | 27mer antisense | GAGGAUUUAGAAAUAAGUGGUAGUCA | 466 |
| | strand | C | |
| SNCA-952 | 27mer antisense | UGAGGUUUUAGAAAUAAGUGGUAGUC | 467 |
| | strand | A | |
| SNCA-953 | 27mer antisense | GUGAGUAUUUAGAAAUAAGUGGUAGU | 468 |
| | strand | C | |
| SNCA-954 | 27mer antisense | AGUGAUGAUUUAGAAAUAAGUGGUAG | 469 |
| | strand | U | |
| SNCA- | 27mer antisense | UUAUAUAUAUUAACAAAUUUCACAAU | 470 |
| 1081 | strand | A | |
| SNCA- | 27mer antisense | AUUAUUUAUAUUAACAAAUUUCACAA | 471 |
| 1082 | strand | U | |
| SNCA- | 27mer antisense | UAUUAUAUAUAUUAACAAAUUUCACA | 472 |
| 1083 | strand | A | |
| SNCA- | 27mer antisense | GUAUUUUAUAUAUUAACAAAUUUCAC | 473 |
| 1084 | strand | A | |
| SNCA- | 27mer antisense | AGUAUUAUAUAUAUUAACAAAUUUCA | 474 |
| 1085 | strand | C | |
| SNCA- | 27mer antisense | UCACCUUUUAUAUACAAACACAAGUG | 475 |
| 1188 | strand | A | |
| SNCA- | 27mer antisense | CUCACUAUUUAUAUACAAACACAAGU | 476 |
| 1189 | strand | G | |
| SNCA- | 27mer antisense | UCUCAUCAUUUAUAUACAAACACAAG | 477 |
| 1190 | strand | U | |
| SNCA- | 27mer antisense | UUCUCUCCAUUUAUAUACAAACACAA | 478 |
| 1191 | strand | G | |
| SNCA- | 27mer antisense | AUUCUUACCAUUUAUAUACAAACACA | 479 |
| 1192 | strand | A | |
| SNCA- | 27mer antisense | AAUUCUCACCAUUUAUAUACAAACAC | 480 |
| 1193 | strand | A | |
| SNCA-225 | 27mer antisense | GGCUAUUGAAUUCCUUUACACCACAC | 481 |
| | strand | U | |
| SNCA-226 | 27mer antisense | UGGCUUAUGAAUUCCUUUACACCACA | 482 |
| | strand | C | |
| SNCA-227 | 27mer antisense | AUGGCUAAUGAAUUCCUUUACACCAC | 483 |
| | strand | A | |
| SNCA-228 | 27mer antisense | CAUGGUUAAUGAAUUCCUUUACACCA | 484 |
| | strand | C | |
| SNCA-229 | 27mer antisense | CCAUGUCUAAUGAAUUCCUUUACACC | 485 |
| | strand | A | |
| SNCA-230 | 27mer antisense | UCCAUUGCUAAUGAAUUCCUUUACAC | 486 |
| | strand | C | |
| SNCA-231 | 27mer antisense | AUCCAUGGCUAAUGAAUUCCUUUACA | 487 |
| | strand | C | |
| SNCA-232 | 27mer antisense | CAUCCUUGGCUAAUGAAUUCCUUUAC | 488 |
| | strand | A | |
| SNCA-233 | 27mer antisense | ACAUCUAUGGCUAAUGAAUUCCUUUA | 489 |
| | strand | C | |
| SNCA-234 | 27mer antisense | UACAUUCAUGGCUAAUGAAUUCCUUU | 490 |
| | strand | A | |
| SNCA-235 | 27mer antisense | AUACAUCCAUGGCUAAUGAAUUCCUU | 491 |
| | strand | U | |
| SNCA-236 | 27mer antisense | AAUACUUCCAUGGCUAAUGAAUUCCU | 492 |
| | strand | U | |
| SNCA-237 | 27mer antisense | GAAUAUAUCCAUGGCUAAUGAAUUCC | 493 |
| | strand | U | |
| SNCA-238 | 27mer antisense | UGAAUUCAUCCAUGGCUAAUGAAUUC | 494 |
| | strand | C | |
| SNCA-239 | 27mer antisense | AUGAAUACAUCCAUGGCUAAUGAAUU | 495 |
| | strand | C | |
| SNCA-240 | 27mer antisense | CAUGAUUACAUCCAUGGCUAAUGAAU | 496 |
| | strand | U | |
| SNCA-241 | 27mer antisense | UCAUGUAUACAUCCAUGGCUAAUGAA | 497 |
| | strand | U | |
| SNCA-242 | 27mer antisense | UUCAUUAAUACAUCCAUGGCUAAUGA | 498 |
| | strand | A | |
| SNCA-243 | 27mer antisense | UUUCAUGAAUACAUCCAUGGCUAAUG | 499 |
| | strand | A | |
| SNCA-244 | 27mer antisense | CUUUCUUGAAUACAUCCAUGGCUAAU | 500 |
| | strand | G | |
| SNCA-245 | 27mer antisense | CCUUUUAUGAAUACAUCCAUGGCUAA | 501 |
| | strand | U | |
| SNCA-246 | 27mer antisense | UCCUUUCAUGAAUACAUCCAUGGCUA | 502 |
| | strand | A | |
| SNCA-247 | 27mer antisense | GUCCUUUCAUGAAUACAUCCAUGGCU | 503 |
| | strand | A | |
| SNCA-248 | 27mer antisense | AGUCCUUUCAUGAAUACAUCCAUGGC | 504 |
| | strand | U | |
| SNCA-249 | 27mer antisense | AAGUCUUUUCAUGAAUACAUCCAUGG | 505 |
| | strand | C | |
| SNCA-250 | 27mer antisense | AAAGUUCUUUCAUGAAUACAUCCAUG | 506 |
| | strand | G | |
| SNCA-251 | 27mer antisense | GAAAGUCCUUUCAUGAAUACAUCCAU | 507 |
| | strand | G | |
| SNCA-252 | 27mer antisense | UGAAAUUCCUUUCAUGAAUACAUCCA | 508 |
| | strand | U | |
| SNCA-253 | 27mer antisense | UUGAAUGUCCUUUCAUGAAUACAUCC | 509 |
| | strand | A | |
| SNCA-254 | 27mer antisense | UUUGAUAGUCCUUUCAUGAAUACAUC | 510 |
| | strand | C | |
| SNCA-256 | 27mer antisense | CCUUUUAAAGUCCUUUCAUGAAUACA | 511 |
| | strand | U | |
| SNCA-330 | 27mer antisense | CUCUUUUGUCUUUCCUGCUGCUUCUG | 512 |
| | strand | C | |
| SNCA-335 | 27mer antisense | ACACCUUCUUUUGUCUUUCCUGCUGC | 513 |
| | strand | U | |
| SNCA-337 | 27mer antisense | GAACAUCCUCUUUUGUCUUUCCUGCU | 514 |
| | strand | G | |
| SNCA-341 | 27mer antisense | UAGAGUACACCCUCUUUUGUCUUUCC | 515 |
| | strand | U | |
| SNCA-342 | 27mer antisense | AUAGAUAACACCCUCUUUUGUCUUUC | 516 |
| | strand | C | |
| SNCA-344 | 27mer antisense | ACAUAUAGAACACCCUCUUUUGUCUU | 517 |
| | strand | U | |
| SNCA-345 | 27mer antisense | UACAUUGAGAACACCCUCUUUUGUCU | 518 |
| | strand | U | |
| SNCA-351 | 27mer antisense | GGAGCUUACAUAGAGAACACCCUCUU | 519 |
| | strand | U | |
| SNCA-353 | 27mer antisense | UUGGAUCCUACAUAGAGAACACCCUC | 520 |
| | strand | U | |
| SNCA-355 | 27mer antisense | UUUUGUAGCCUACAUAGAGAACACCC | 521 |
| | strand | U | |
| SNCA-638 | 27mer antisense | GGUUCUUAGUCUUGAUACCCUUCCUC | 522 |
| | strand | A | |
| SNCA-641 | 27mer antisense | UCAGGUUCGUAGUCUUGAUACCCUUC | 523 |
| | strand | C | |
| SNCA-642 | 27mer antisense | UUCAGUUUCGUAGUCUUGAUACCCUU | 524 |
| | strand | C | |
| SNCA-647 | 27mer antisense | UAGGCUUCAGGUUCGUAGUCUUGAUA | 525 |
| | strand | C | |
| SNCA-648 | 27mer antisense | UUAGGUUUCAGGUUCGUAGUCUUGAU | 526 |
| | strand | A | |
| SNCA-650 | 27mer antisense | UCUUAUGCUUCAGGUUCGUAGUCUUG | 527 |
| | strand | A | |
| SNCA-652 | 27mer antisense | UUUCUUAGGCUUCAGGUUCGUAGUCU | 528 |
| | strand | U | |
| SNCA-653 | 27mer antisense | AUUUCUUAGGCUUCAGGUUCGUAGUC | 529 |
| | strand | U | |
| SNCA-654 | 27mer antisense | UAUUUUUUAGGCUUCAGGUUCGUAGU | 530 |
| | strand | C | |
| SNCA-656 | 27mer antisense | GAUAUUUCUUAGGCUUCAGGUUCGUA | 531 |
| | strand | G | |
| SNCA-657 | 27mer antisense | AGAUAUUUCUUAGGCUUCAGGUUCGU | 532 |
| | strand | A | |
| SNCA-659 | 27mer antisense | AAAGAUAUUUCUUAGGCUUCAGGUUC | 533 |
| | strand | G | |
| SNCA-660 | 27mer antisense | CAAAGUUAUUUCUUAGGCUUCAGGUU | 534 |
| | strand | C | |
| SNCA-661 | 27mer antisense | GCAAAUAUAUUUCUUAGGCUUCAGGU | 535 |
| | strand | U | |
| SNCA-662 | 27mer antisense | AGCAAUGAUAUUUCUUAGGCUUCAGG | 536 |
| | strand | U | |
| SNCA-663 | 27mer antisense | GAGCAUAGAUAUUUCUUAGGCUUCAG | 537 |
| | strand | G | |
| SNCA-668 | 27mer antisense | ACUGGUAGCAAAGAUAUUUCUUAGGC | 538 |
| | strand | U | |
| SNCA-669 | 27mer antisense | AACUGUGAGCAAAGAUAUUUCUUAGG | 539 |
| | strand | C | |
| SNCA-672 | 27mer antisense | AGAAAUUGGGAGCAAAGAUAUUUCUU | 540 |
| | strand | A | |
| SNCA-675 | 27mer antisense | UCAAGUAACUGGGAGCAAAGAUAUUU | 541 |
| | strand | C | |
| SNCA-676 | 27mer antisense | CUCAAUAAACUGGGAGCAAAGAUAUU | 542 |
| | strand | U | |
| SNCA-689 | 27mer antisense | UCUGUUAGCAGAUCUCAAGAAACUGG | 543 |
| | strand | G | |
| SNCA-724 | 27mer antisense | CACAUUGGAACUGAGCACUUGUACAG | 544 |
| | strand | G | |
| SNCA-744 | 27mer antisense | UGAGAUAUGUCAUGACUGGGCACAUU | 545 |
| | strand | G | |
| SNCA-745 | 27mer antisense | UUGAGUAAUGUCAUGACUGGGCACAU | 546 |
| | strand | U | |
| SNCA-746 | 27mer antisense | UUUGAUAAAUGUCAUGACUGGGCACA | 547 |
| | strand | U | |
| SNCA-751 | 27mer antisense | AAAACUUUGAGAAAUGUCAUGACUGG | 548 |
| | strand | G | |
| SNCA-752 | 27mer antisense | AAAAAUUUUGAGAAAUGUCAUGACUG | 549 |
| | strand | G | |
| SNCA-753 | 27mer antisense | UAAAAUCUUUGAGAAAUGUCAUGACU | 550 |
| | strand | G | |
| SNCA-754 | 27mer antisense | GUAAAUACUUUGAGAAAUGUCAUGAC | 551 |
| | strand | U | |
| SNCA-755 | 27mer antisense | UGUAAUAACUUUGAGAAAUGUCAUGA | 552 |
| | strand | C | |
| SNCA-756 | 27mer antisense | CUGUAUAAACUUUGAGAAAUGUCAUG | 553 |
| | strand | A | |
| SNCA-757 | 27mer antisense | ACUGUUAAAACUUUGAGAAAUGUCAU | 554 |
| | strand | G | |
| SNCA-758 | 27mer antisense | CACUGUAAAAACUUUGAGAAAUGUCA | 555 |
| | strand | U | |
| SNCA-759 | 27mer antisense | ACACUUUAAAAACUUUGAGAAAUGUC | 556 |
| | strand | A | |
| SNCA-760 | 27mer antisense | UACACUGUAAAAACUUUGAGAAAUGU | 557 |
| | strand | C | |
| SNCA-761 | 27mer antisense | AUACAUUGUAAAAACUUUGAGAAAUG | 558 |
| | strand | U | |
| SNCA-762 | 27mer antisense | GAUACUCUGUAAAAACUUUGAGAAAU | 559 |
| | strand | G | |
| SNCA-789 | 27mer antisense | UCAAUUACUGCUGAUGGAAGACUUCG | 560 |
| | strand | A | |
| SNCA-795 | 27mer antisense | GAUACUUCAAUCACUGCUGAUGGAAG | 561 |
| | strand | A | |
| SNCA-796 | 27mer antisense | AGAUAUUUCAAUCACUGCUGAUGGAA | 562 |
| | strand | G | |
| SNCA-797 | 27mer antisense | CAGAUUCUUCAAUCACUGCUGAUGGA | 563 |
| | strand | A | |
| SNCA-798 | 27mer antisense | ACAGAUACUUCAAUCACUGCUGAUGG | 564 |
| | strand | A | |
| SNCA-799 | 27mer antisense | UACAGUUACUUCAAUCACUGCUGAUG | 565 |
| | strand | G | |
| SNCA-800 | 27mer antisense | GUACAUAUACUUCAAUCACUGCUGAU | 566 |
| | strand | G | |
| SNCA-801 | 27mer antisense | GGUACUGAUACUUCAAUCACUGCUGA | 567 |
| | strand | U | |
| SNCA-802 | 27mer antisense | AGGUAUAGAUACUUCAAUCACUGCUG | 568 |
| | strand | A | |
| SNCA-803 | 27mer antisense | CAGGUUCAGAUACUUCAAUCACUGCU | 569 |
| | strand | G | |
| SNCA-804 | 27mer antisense | GCAGGUACAGAUACUUCAAUCACUGC | 570 |
| | strand | U | |
| SNCA-805 | 27mer antisense | GGCAGUUACAGAUACUUCAAUCACUG | 571 |
| | strand | C | |
| SNCA-809 | 27mer antisense | UGGGGUCAGGUACAGAUACUUCAAUC | 572 |
| | strand | A | |
| SNCA-839 | 27mer antisense | UCAGUUAAAGGGAAGCACCGAAAUGC | 573 |
| | strand | U | |
| SNCA-844 | 27mer antisense | UCACUUCAGUGAAAGGGAAGCACCGA | 574 |
| | strand | A | |
| SNCA-845 | 27mer antisense | UUCACUUCAGUGAAAGGGAAGCACCG | 575 |
| | strand | A | |
| SNCA-846 | 27mer antisense | AUUCAUUUCAGUGAAAGGGAAGCACC | 576 |
| | strand | G | |
| SNCA-847 | 27mer antisense | UAUUCUCUUCAGUGAAAGGGAAGCAC | 577 |
| | strand | C | |
| SNCA-848 | 27mer antisense | GUAUUUACUUCAGUGAAAGGGAAGCA | 578 |
| | strand | C | |
| SNCA-849 | 27mer antisense | UGUAUUCACUUCAGUGAAAGGGAAGC | 579 |
| | strand | A | |
| SNCA-850 | 27mer antisense | AUGUAUUCACUUCAGUGAAAGGGAAG | 580 |
| | strand | C | |
| SNCA-851 | 27mer antisense | CAUGUUUUCACUUCAGUGAAAGGGAA | 58 |
| | strand | G | |
| SNCA-852 | 27mer antisense | CCAUGUAUUCACUUCAGUGAAAGGGA | 582 |
| | strand | A | |
| SNCA-853 | 27mer antisense | ACCAUUUAUUCACUUCAGUGAAAGGG | 583 |
| | strand | A | |
| SNCA-854 | 27mer antisense | UACCAUGUAUUCACUUCAGUGAAAGG | 584 |
| | strand | G | |
| SNCA-855 | 27mer antisense | CUACCUUGUAUUCACUUCAGUGAAAG | 585 |
| | strand | G | |
| SNCA-856 | 27mer antisense | GCUACUAUGUAUUCACUUCAGUGAAA | 586 |
| | strand | G | |
| SNCA-857 | 27mer antisense | UGCUAUCAUGUAUUCACUUCAGUGAA | 587 |
| | strand | A | |
| SNCA-858 | 27mer antisense | CUGCUUCCAUGUAUUCACUUCAGUGA | 588 |
| | strand | A | |
| SNCA-859 | 27mer antisense | CCUGCUACCAUGUAUUCACUUCAGUG | 589 |
| | strand | A | |
| SNCA-860 | 27mer antisense | CCCUGUUACCAUGUAUUCACUUCAGU | 590 |
| | strand | G | |
| SNCA-861 | 27mer antisense | ACCCUUCUACCAUGUAUUCACUUCAG | 591 |
| | strand | U | |
| SNCA-863 | 27mer antisense | AGACCUUGCUACCAUGUAUUCACUUC | 592 |
| | strand | A | |
| SNCA-864 | 27mer antisense | AAGACUCUGCUACCAUGUAUUCACUU | 593 |
| | strand | C | |
| SNCA-865 | 27mer antisense | AAAGAUCCUGCUACCAUGUAUUCACU | 594 |
| | strand | U | |
| SNCA-867 | 27mer antisense | ACAAAUACCCUGCUACCAUGUAUUCA | 595 |
| | strand | C | |
| SNCA-868 | 27mer antisense | CACAAUGACCCUGCUACCAUGUAUUC | 596 |
| | strand | A | |
| SNCA-875 | 27mer antisense | CACAGUACACAAAGACCCUGCUACCAU | 597 |
| | strand | | |
| SNCA-881 | 27mer antisense | AAAAUUCACAGCACACAAAGACCCUG | 598 |
| | strand | C | |
| SNCA-883 | 27mer antisense | ACAAAUUCCACAGCACACAAAGACCCU | 599 |
| | strand | | |
| SNCA-889 | 27mer antisense | GAAGCUACAAAAUCCACAGCACACAA | 600 |
| | strand | A | |
| SNCA-890 | 27mer antisense | UGAAGUCACAAAAUCCACAGCACACA | 601 |
| | strand | A | |
| SNCA-891 | 27mer antisense | UUGAAUCCACAAAAUCCACAGCACAC | 602 |
| | strand | A | |
| SNCA-892 | 27mer antisense | AUUGAUGCCACAAAAUCCACAGCACA | 603 |
| | strand | C | |
| SNCA-893 | 27mer antisense | GAUUGUAGCCACAAAAUCCACAGCAC | 604 |
| | strand | A | |
| SNCA-894 | 27mer antisense | AGAUUUAAGCCACAAAAUCCACAGCA | 605 |
| | strand | C | |
| SNCA-895 | 27mer antisense | UAGAUUGAAGCCACAAAAUCCACAGC | 606 |
| | strand | A | |
| SNCA-897 | 27mer antisense | CGUAGUUUGAAGCCACAAAAUCCACA | 607 |
| | strand | G | |
| SNCA-898 | 27mer antisense | UCGUAUAUUGAAGCCACAAAAUCCAC | 608 |
| | strand | A | |
| SNCA-900 | 27mer antisense | CAUCGUAGAUUGAAGCCACAAAAUCC | 609 |
| | strand | A | |
| SNCA-901 | 27mer antisense | ACAUCUUAGAUUGAAGCCACAAAAUC | 610 |
| | strand | C | |
| SNCA-956 | 27mer antisense | AUAGUUAGGAUUUAGAAAUAAGUGGU | 611 |
| | strand | A | |
| SNCA-957 | 27mer antisense | AAUAGUGAGGAUUUAGAAAUAAGUGG | 612 |
| | strand | U | |
| SNCA-958 | 27mer antisense | AAAUAUUGAGGAUUUAGAAAUAAGUG | 613 |
| | strand | G | |
| SNCA-959 | 27mer antisense | AAAAUUGUGAGGAUUUAGAAAUAAGU | 614 |
| | strand | G | |
| SNCA-961 | 27mer antisense | AAAAAUUAGUGAGGAUUUAGAAAUAA | 615 |
| | strand | G | |
| SNCA-962 | 27mer antisense | AAAAAUAUAGUGAGGAUUUAGAAAUA | 616 |
| | strand | A | |
| SNCA-963 | 27mer antisense | CAAAAUAAUAGUGAGGAUUUAGAAAU | 617 |
| | strand | A | |
| SNCA-964 | 27mer antisense | ACAAAUAAAUAGUGAGGAUUUAGAAA | 618 |
| | strand | U | |
| SNCA-965 | 27mer antisense | AACAAUAAAAUAGUGAGGAUUUAGAA | 619 |
| | strand | A | |
| SNCA-966 | 27mer antisense | CAACAUAAAAAUAGUGAGGAUUUAGA | 620 |
| | strand | A | |
| SNCA-967 | 27mer antisense | GCAACUAAAAAAUAGUGAGGAUUUAG | 621 |
| | strand | A | |
| SNCA-968 | 27mer antisense | AGCAAUAAAAAAAUAGUGAGGAUUUA | 622 |
| | strand | G | |
| SNCA-969 | 27mer antisense | CAGCAUCAAAAAAAUAGUGAGGAUUU | 623 |
| | strand | A | |
| SNCA-970 | 27mer antisense | ACAGCUACAAAAAAAUAGUGAGGAUU | 624 |
| | strand | U | |
| SNCA-971 | 27mer antisense | AACAGUAACAAAAAAAUAGUGAGGAU | 625 |
| | strand | U | |
| SNCA-972 | 27mer antisense | CAACAUCAACAAAAAAAUAGUGAGGA | 626 |
| | strand | U | |
| SNCA-973 | 27mer antisense | ACAACUGCAACAAAAAAAUAGUGAGG | 627 |
| | strand | A | |
| SNCA-974 | 27mer antisense | AACAAUAGCAACAAAAAAAUAGUGAG | 628 |
| | strand | G | |
| SNCA-975 | 27mer antisense | GAACAUCAGCAACAAAAAAAUAGUGA | 629 |
| | strand | G | |
| SNCA-976 | 27mer antisense | UGAACUACAGCAACAAAAAAAUAGUG | 630 |
| | strand | A | |
| SNCA-977 | 27mer antisense | CUGAAUAACAGCAACAAAAAAAUAGU | 631 |
| | strand | G | |
| SNCA-978 | 27mer antisense | UCUGAUCAACAGCAACAAAAAAAUAG | 632 |
| | strand | U | |
| SNCA-979 | 27mer antisense | UUCUGUACAACAGCAACAAAAAAAUA | 633 |
| | strand | G | |
| SNCA-980 | 27mer antisense | CUUCUUAACAACAGCAACAAAAAAAU | 634 |
| | strand | A | |
| SNCA-981 | 27mer antisense | ACUUCUGAACAACAGCAACAAAAAAA | 635 |
| | strand | U | |
| SNCA-982 | 27mer antisense | AACUUUUGAACAACAGCAACAAAAAA | 636 |
| | strand | A | |
| SNCA-983 | 27mer antisense | CAACUUCUGAACAACAGCAACAAAAA | 637 |
| | strand | A | |
| SNCA-984 | 27mer antisense | ACAACUUCUGAACAACAGCAACAAAA | 638 |
| | strand | A | |
| SNCA-985 | 27mer antisense | AACAAUUUCUGAACAACAGCAACAAA | 639 |
| | strand | A | |
| SNCA-986 | 27mer antisense | UAACAUCUUCUGAACAACAGCAACAA | 640 |
| | strand | A | |
| SNCA-987 | 27mer antisense | CUAACUACUUCUGAACAACAGCAACA | 641 |
| | strand | A | |
| SNCA-988 | 27mer antisense | ACUAAUAACUUCUGAACAACAGCAAC | 642 |
| | strand | A | |
| SNCA-989 | 27mer antisense | CACUAUCAACUUCUGAACAACAGCAA | 643 |
| | strand | C | |
| SNCA-990 | 27mer antisense | UCACUUACAACUUCUGAACAACAGCA | 644 |
| | strand | A | |
| SNCA-991 | 27mer antisense | AUCACUAACAACUUCUGAACAACAGC | 645 |
| | strand | A | |
| SNCA-992 | 27mer antisense | AAUCAUUAACAACUUCUGAACAACAG | 646 |
| | strand | C | |
| SNCA-993 | 27mer antisense | AAAUCUCUAACAACUUCUGAACAACA | 647 |
| | strand | G | |
| SNCA-994 | 27mer antisense | CAAAUUACUAACAACUUCUGAACAAC | 648 |
| | strand | A | |
| SNCA-995 | 27mer antisense | GCAAAUCACUAACAACUUCUGAACAA | 649 |
| | strand | C | |
| SNCA-996 | 27mer antisense | AGCAAUUCACUAACAACUUCUGAACA | 650 |
| | strand | A | |
| SNCA-997 | 27mer antisense | UAGCAUAUCACUAACAACUUCUGAAC | 651 |
| | strand | A | |
| SNCA-998 | 27mer antisense | AUAGCUAAUCACUAACAACUUCUGAA | 652 |
| | strand | C | |
| SNCA-999 | 27mer antisense | GAUAGUAAAUCACUAACAACUUCUGA | 653 |
| | strand | A | |
| SNCA- | 27mer antisense | UGAUAUCAAAUCACUAACAACUUCUG | 654 |
| 1000 | strand | A | |
| SNCA- | 27mer antisense | AUGAUUGCAAAUCACUAACAACUUCU | 655 |
| 1001 | strand | G | |
| SNCA- | 27mer antisense | UAUGAUAGCAAAUCACUAACAACUUC | 656 |
| 1002 | strand | U | |
| SNCA- | 27mer antisense | AUAUGUUAGCAAAUCACUAACAACUU | 657 |
| 1003 | strand | C | |
| SNCA- | 27mer antisense | UAUAUUAUAGCAAAUCACUAACAACU | 658 |
| 1004 | strand | U | |
| SNCA- | 27mer antisense | AUAUAUGAUAGCAAAUCACUAACAAC | 659 |
| 1005 | strand | U | |
| SNCA- | 27mer antisense | AAAAGUCACCUAAAAAUCUUAUAAUA | 660 |
| 1028 | strand | U | |
| SNCA- | 27mer antisense | UAAAAUACACCUAAAAAUCUUAUAAU | 661 |
| 1029 | strand | A | |
| SNCA- | 27mer antisense | UUAAAUGACACCUAAAAAUCUUAUAA | 662 |
| 1030 | strand | U | |
| SNCA- | 27mer antisense | AUUAAUAGACACCUAAAAAUCUUAUA | 663 |
| 1031 | strand | A | |
| SNCA- | 27mer antisense | CAUUAUAAGACACCUAAAAAUCUUAU | 664 |
| 1032 | strand | A | |
| SNCA- | 27mer antisense | UCAUUUAAAGACACCUAAAAAUCUUA | 665 |
| 1033 | strand | U | |
| SNCA- | 27mer antisense | AUCAUUAAAAGACACCUAAAAAUCUU | 666 |
| 1034 | strand | A | |
| SNCA- | 27mer antisense | UAUCAUUAAAAGACACCUAAAAAUCU | 667 |
| 1035 | strand | U | |
| SNCA- | 27mer antisense | GUAUCUUUAAAAGACACCUAAAAAUC | 668 |
| 1036 | strand | U | |
| SNCA- | 27mer antisense | AGUAUUAUUAAAAGACACCUAAAAAU | 669 |
| 1037 | strand | C | |
| SNCA- | 27mer antisense | CAGUAUCAUUAAAAGACACCUAAAAA | 670 |
| 1038 | strand | U | |
| SNCA- | 27mer antisense | ACAGUUUCAUUAAAAGACACCUAAAA | 671 |
| 1039 | strand | A | |
| SNCA- | 27mer antisense | GACAGUAUCAUUAAAAGACACCUAAA | 672 |
| 1040 | strand | A | |
| SNCA- | 27mer antisense | AGACAUUAUCAUUAAAAGACACCUAA | 673 |
| 1041 | strand | A | |
| SNCA- | 27mer antisense | UAGACUGUAUCAUUAAAAGACACCUA | 674 |
| 1042 | strand | A | |
| SNCA- | 27mer antisense | UUAGAUAGUAUCAUUAAAAGACACCU | 675 |
| 1043 | strand | A | |
| SNCA- | 27mer antisense | CUUAGUCAGUAUCAUUAAAAGACACC | 676 |
| 1044 | strand | U | |
| SNCA- | 27mer antisense | UCUUAUACAGUAUCAUUAAAAGACAC | 677 |
| 1045 | strand | C | |
| SNCA- | 27mer antisense | UUCUUUGACAGUAUCAUUAAAAGACA | 678 |
| 1046 | strand | C | |
| SNCA- | 27mer antisense | AUUCUUAGACAGUAUCAUUAAAAGAC | 679 |
| 1047 | strand | A | |
| SNCA- | 27mer antisense | UAUUCUUAGACAGUAUCAUUAAAAGA | 680 |
| 1048 | strand | C | |
| SNCA- | 27mer antisense | UUAUUUUUAGACAGUAUCAUUAAAAG | 681 |
| 1049 | strand | A | |
| SNCA- | 27mer antisense | AUUAUUCUUAGACAGUAUCAUUAAAA | 682 |
| 1050 | strand | G | |
| SNCA- | 27mer antisense | CAUUAUUCUUAGACAGUAUCAUUAAA | 683 |
| 1051 | strand | A | |
| SNCA- | 27mer antisense | UCAUUUUUCUUAGACAGUAUCAUUAA | 684 |
| 1052 | strand | A | |
| SNCA- | 27mer antisense | GUCAUUAUUCUUAGACAGUAUCAUUA | 685 |
| 1053 | strand | A | |
| SNCA- | 27mer antisense | CGUCAUUAUUCUUAGACAGUAUCAUU | 686 |
| 1054 | strand | A | |
| SNCA- | 27mer antisense | ACGUCUUUAUUCUUAGACAGUAUCAU | 687 |
| 1055 | strand | U | |
| SNCA- | 27mer antisense | UACGUUAUUAUUCUUAGACAGUAUCA | 688 |
| 1056 | strand | U | |
| SNCA- | 27mer antisense | AUACGUCAUUAUUCUUAGACAGUAUC | 689 |
| 1057 | strand | A | |
| SNCA- | 27mer antisense | AAUACUUCAUUAUUCUUAGACAGUAU | 690 |
| 1058 | strand | C | |
| SNCA- | 27mer antisense | UAUAUUUUAACAAAUUUCACAAUACG | 691 |
| 1078 | strand | U | |
| SNCA- | 27mer antisense | AUAUAUAUUAACAAAUUUCACAAUAC | 692 |
| 1079 | strand | G | |
| SNCA- | 27mer antisense | UAUAUUUAUUAACAAAUUUCACAAUA | 693 |
| 1080 | strand | C | |
| SNCA- | 27mer antisense | AAGUAUUAUAUAUAUUAACAAAUUUC | 694 |
| 1086 | strand | A | |
| SNCA- | 27mer antisense | UAAGUUUUAUAUAUAUUAACAAAUUU | 695 |
| 1087 | strand | C | |
| SNCA- | 27mer antisense | UUAAGUAUUAUAUAUAUUAACAAAUU | 696 |
| 1088 | strand | U | |
| SNCA- | 27mer antisense | UUUAAUUAUUAUAUAUAUUAACAAAU | 697 |
| 1089 | strand | U | |
| SNCA- | 27mer antisense | UUUUAUGUAUUAUAUAUAUUAACAAA | 698 |
| 1090 | strand | U | |
| SNCA- | 27mer antisense | UUUUUUAGUAUUAUAUAUAUUAACAA | 699 |
| 1091 | strand | A | |
| SNCA- | 27mer antisense | AUUUUUAAGUAUUAUAUAUAUUAACA | 700 |
| 1092 | strand | A | |
| SNCA- | 27mer antisense | UAUUUUUAAGUAUUAUAUAUAUUAAC | 701 |
| 1093 | strand | A | |
| SNCA- | 27mer antisense | AGGUGUAUAGUUUCAUGCUCACAUAU | 702 |
| 1116 | strand | U | |
| SNCA- | 27mer antisense | UAGGUUCAUAGUUUCAUGCUCACAUA | 703 |
| 1117 | strand | U | |
| SNCA- | 27mer antisense | UAUAGUUGCAUAGUUUCAUGCUCACA | 704 |
| 1119 | strand | U | |
| SNCA- | 27mer antisense | UUAUAUGUGCAUAGUUUCAUGCUCAC | 705 |
| 1120 | strand | A | |
| SNCA- | 27mer antisense | UUUAUUGGUGCAUAGUUUCAUGCUCA | 706 |
| 1121 | strand | C | |
| SNCA- | 27mer antisense | AUUUAUAGGUGCAUAGUUUCAUGCUC | 707 |
| 1122 | strand | A | |
| SNCA- | 27mer antisense | UAUUUUUAGGUGCAUAGUUUCAUGCU | 708 |
| 1123 | strand | C | |
| SNCA- | 27mer antisense | GUAUUUAUAGGUGCAUAGUUUCAUGC | 709 |
| 1124 | strand | U | |
| SNCA- | 27mer antisense | AGUAUUUAUAGGUGCAUAGUUUCAUG | 710 |
| 1125 | strand | C | |
| SNCA- | 27mer antisense | UAGUAUUUAUAGGUGCAUAGUUUCAU | 711 |
| 1126 | strand | G | |
| SNCA- | 27mer antisense | UUAGUUUUUAUAGGUGCAUAGUUUCA | 712 |
| 1127 | strand | U | |
| SNCA- | 27mer antisense | UUUAGUAUUUAUAGGUGCAUAGUUUC | 713 |
| 1128 | strand | A | |
| SNCA- | 27mer antisense | AUUUAUUAUUUAUAGGUGCAUAGUUU | 714 |
| 1129 | strand | C | |
| SNCA- | 27mer antisense | UAUUUUGUAUUUAUAGGUGCAUAGUU | 715 |
| 1130 | strand | U | |
| SNCA- | 27mer antisense | AUAUUUAGUAUUUAUAGGUGCAUAGU | 716 |
| 1131 | strand | U | |
| SNCA- | 27mer antisense | CAUAUUUAGUAUUUAUAGGUGCAUAG | 717 |
| 1132 | strand | U | |
| SNCA- | 27mer antisense | UCAUAUUUAGUAUUUAUAGGUGCAUA | 718 |
| 1133 | strand | G | |
| SNCA- | 27mer antisense | UAAUUUUCACCAUUUAUAUACAAACA | 719 |
| 1194 | strand | C | |
| SNCA- | 27mer antisense | UUAAUUCUCACCAUUUAUAUACAAAC | 720 |
| 1195 | strand | A | |
| SNCA- | 27mer antisense | UUUAAUUCUCACCAUUUAUAUACAAA | 721 |
| 1196 | strand | C | |
| SNCA- | 27mer antisense | UUUUAUUUCUCACCAUUUAUAUACAA | 722 |
| 1197 | strand | A | |
| SNCA- | 27mer antisense | AUUUUUAUUCUCACCAUUUAUAUACA | 723 |
| 1198 | strand | A | |
| SNCA- | 27mer antisense | UAUUUUAAUUCUCACCAUUUAUAUAC | 724 |
| 1199 | strand | A | |
| SNCA- | 27mer antisense | UUAUUUUAAUUCUCACCAUUUAUAUA | 725 |
| 1200 | strand | C | |
| SNCA- | 27mer antisense | UUUAUUUUAAUUCUCACCAUUUAUAU | 726 |
| 1201 | strand | A | |
| SNCA- | 27mer antisense | UUUUAUUUUAAUUCUCACCAUUUAUA | 727 |
| 1202 | strand | U | |
| SNCA- | 27mer antisense | GUUUUUUUUUAAUUCUCACCAUUUAU | 728 |
| 1203 | strand | A | |
| SNCA- | 27mer antisense | CGUUUUAUUUUAAUUCUCACCAUUUA | 729 |
| 1204 | strand | U | |
| SNCA- | 27mer antisense | ACGUUUUAUUUUAAUUCUCACCAUUU | 730 |
| 1205 | strand | A | |
| SNCA- | 27mer antisense | AACGUUUUAUUUUAAUUCUCACCAUU | 731 |
| 1206 | strand | U | |
| SNCA- | 27mer antisense | UAACGUUUUAUUUUAAUUCUCACCAU | 732 |
| 1207 | strand | U | |
| SNCA- | 27mer antisense | AUAACUUUUUAUUUUAAUUCUCACCA | 733 |
| 1208 | strand | U | |
| SNCA- | 27mer antisense | UUAAAUUGAGAUGGGAUAAAAAUAAA | 734 |
| 1250 | strand | A | |
| SNCA- | 27mer antisense | UAUUAUAGUGAGAUGGGAUAAAAAUA | 735 |
| 1252 | strand | A | |
| SNCA- | 27mer antisense | UUAUUUAAGUGAGAUGGGAUAAAAAU | 736 |
| 1253 | strand | A | |
| SNCA- | 27mer antisense | AUUAUUAAAGUGAGAUGGGAUAAAAA | 737 |
| 1254 | strand | U | |
| SNCA- | 27mer antisense | UAUUAUUAAAGUGAGAUGGGAUAAAA | 738 |
| 1255 | strand | A | |
| SNCA- | 27mer antisense | UUAUUUUUAAAGUGAGAUGGGAUAAA | 739 |
| 1256 | strand | A | |
| SNCA- | 27mer antisense | UUUAUUAUUAAAGUGAGAUGGGAUAA | 740 |
| 1257 | strand | A | |
| SNCA- | 27mer antisense | UUUUAUUAUUAAAGUGAGAUGGGAUA | 741 |
| 1258 | strand | A | |
| SNCA- | 27mer antisense | UUUUUUUUAUUAAAGUGAGAUGGGAU | 742 |
| 1259 | strand | A | |
| SNCA- | 27mer antisense | AUUUUUAUUAUUAAAGUGAGAUGGGA | 743 |
| 1260 | strand | U | |
| SNCA- | 27mer antisense | GAUUUUUAUUAUUAAAGUGAGAUGGG | 744 |
| 1261 | strand | A | |
| SNCA- | 27mer antisense | UGAUUUUUAUUAUUAAAGUGAGAUGG | 745 |
| 1262 | strand | G | |
| SNCA- | 27mer antisense | AUGAUUUUUAUUAUUAAAGUGAGAUG | 746 |
| 1263 | strand | G | |
| SNCA- | 27mer antisense | CAUGAUUUUUAUUAUUAAAGUGAGAU | 747 |
| 1264 | strand | G | |
| SNCA- | 27mer antisense | GCAUGUUUUUUAUUAUUAAAGUGAGA | 748 |
| 1265 | strand | U | |
| SNCA- | 27mer antisense | AGCAUUAUUUUUAUUAUUAAAGUGAG | 749 |
| 1266 | strand | A | |
| SNCA- | 27mer antisense | AAGCAUGAUUUUUAUUAUUAAAGUGA | 750 |
| 1267 | strand | G | |
| SNCA- | 27mer antisense | UUCUAUAAUUCCUCCUUCUUCAAAUG | 751 |
| 1351 | strand | G | |
| SNCA- | 27mer antisense | AUUUUUUCUACCUCUUCUAAAAUUCC | 752 |
| 1365 | strand | U | |
| SNCA- | 27mer antisense | AUGUUUCAUUUUCUCUACCUCUUCUA | 753 |
| 1372 | strand | A | |
| SNCA- | 27mer antisense | AAUGUUCCAUUUUCUCUACCUCUUCU | 754 |
| 1373 | strand | A | |
| SNCA- | 27mer antisense | UAAUGUUCCAUUUUCUCUACCUCUUC | 755 |
| 1374 | strand | U | |
| SNCA- | 27mer antisense | UUAAUUUUCCAUUUUCUCUACCUCUU | 756 |
| 1375 | strand | C | |
| SNCA- | 27mer antisense | GUUAAUGUUCCAUUUUCUCUACCUCU | 757 |
| 1376 | strand | U | |
| SNCA- | 27mer antisense | GGUUAUUGUUCCAUUUUCUCUACCUC | 758 |
| 1377 | strand | U | |
| SNCA- | 27mer antisense | AGGGUUAAUGUUCCAUUUUCUCUACC | 759 |
| 1379 | strand | U | |
| SNCA- | 27mer antisense | UAGGGUUAAUGUUCCAUUUUCUCUAC | 760 |
| 1380 | strand | C | |
| SNCA- | 27mer antisense | GUAGGUUUAAUGUUCCAUUUUCUCUA | 761 |
| 1381 | strand | C | |
| SNCA- | 27mer antisense | UGUAGUGUUAAUGUUCCAUUUUCUCU | 762 |
| 1382 | strand | A | |
| SNCA- | 27mer antisense | GUGUAUGGUUAAUGUUCCAUUUUCUC | 763 |
| 1383 | strand | U | |
| SNCA- | 27mer antisense | AGUGUUGGGUUAAUGUUCCAUUUUCU | 764 |
| 1384 | strand | C | |
| SNCA- | 27mer antisense | GAGUGUAGGGUUAAUGUUCCAUUUUC | 765 |
| 1385 | strand | U | |
| SNCA- | 27mer antisense | UCCGAUUGUAGGGUUAAUGUUCCAUU | 766 |
| 1388 | strand | U | |
| SNCA- | 27mer antisense | CAUACUAAAACACACUUCUGGCAGUG | 767 |
| 1428 | strand | U | |
| SNCA- | 27mer antisense | GCAUAUCAAAACACACUUCUGGCAGU | 768 |
| 1429 | strand | G | |
| SNCA-259 | Modified 25mer | rUmUrCmArUrGrArArArGrGrArCmUrUmUr | 769 |
| | sense strand | CrArArArGrGrCCA | |
| SNCA-260 | Modified 25mer | rUmCrAmUrGrArArArGrGrArCrUmUrUmCr | 770 |
| | sense strand | ArArArArGrCrCAA | |
| SNCA-261 | Modified 25mer | rCmArUmGrArArArGrGrArCrUrUmUrCmAr | 771 |
| | sense strand | ArArGrArCrCrAAG | |
| SNCA-262 | Modified 25mer | rAmUrGmArArArGrGrArCrUrUrUmCrAmAr | 772 |
| | sense strand | ArGrGrArCrArAGG | |
| SNCA-263 | Modified 25mer | rUmGrAmArArGrGrArCrUrUrUrCmArAmAr | 773 |
| | sense strand | GrGrCrArArArGGA | |
| SNCA-264 | Modified 25mer | rGmArAmArGrGrArCrUrUrUrCrAmArAmGr | 774 |
| | sense strand | GrCrCrArArGrGAG | |
| SNCA-285 | Modified 25mer | rGmGrAmGrGrGrArGrUrUrGrUrGmGrCmUr | 775 |
| | sense strand | GrCrUrArCrUrGAG | |
| SNCA-288 | Modified 25mer | rGmGrGmArGrUrUrGrUrGrGrCrUmGrCmUr | 776 |
| | sense strand | GrCrUrArArGrAAA | |
| SNCA-289 | Modified 25mer | rGmGrAmGrUrUrGrUrGrGrCrUrGmCrUmGr | 777 |
| | sense strand | CrUrGrArGrArAAA | |
| SNCA-290 | Modified 25mer | rGmArGmUrUrGrUrGrGrCrUrGrCmUrGmCr | 778 |
| | sense strand | UrGrArArArArAAC | |
| SNCA-292 | Modified 25mer | rGmUrUmGrUrGrGrCrUrGrCrUrGmCrUmGr | 779 |
| | sense strand | ArGrArArArArCCA | |
| SNCA-293 | Modified 25mer | rUmUrGmUrGrGrCrUrGrCrUrGrCmUrGmAr | 780 |
| | sense strand | GrArArArArCrCAA | |
| SNCA-294 | Modified 25mer | rUmGrUmGrGrCrUrGrCrUrGrCrUmGrAmGr | 781 |
| | sense strand | ArArArArCrCrAAA | |
| SNCA-295 | Modified 25mer | rGmUrGmGrCrUrGrCrUrGrCrUrGmArGmAr | 782 |
| | sense strand | ArArArArCrArAAC | |
| SNCA-296 | Modified 25mer | rUmGrGmCrUrGrCrUrGrCrUrGrAmGrAmAr | 783 |
| | sense strand | ArArCrArArArACA | |
| SNCA-297 | Modified 25mer | rGmGrCmUrGrCrUrGrCrUrGrArGmArAmAr | 784 |
| | sense strand | ArCrCrArArArCAG | |
| SNCA-407 | Modified 25mer | rCmArAmCrArGrUrGrGrCrUrGrAmGrAmAr | 785 |
| | sense strand | GrArCrArArArAGA | |
| SNCA-408 | Modified 25mer | rAmArCmArGrUrGrGrCrUrGrArGmArAmGr | 786 |
| | sense strand | ArCrCrArArArGAG | |
| SNCA-409 | Modified 25mer | rAmCrAmGrUrGrGrCrUrGrArGrAmArGmAr | 787 |
| | sense strand | CrCrArArArGrAGC | |
| SNCA-410 | Modified 25mer | rCmArGmUrGrGrCrUrGrArGrArAmGrAmCr | 788 |
| | sense strand | CrArArArGrArGCA | |
| SNCA-411 | Modified 25mer | rAmGrUmGrGrCrUrGrArGrArArGmArCmCr | 789 |
| | sense strand | ArArArArArGrCAA | |
| SNCA-412 | Modified 25mer | rGmUrGmGrCrUrGrArGrArArGrAmCrCmAr | 790 |
| | sense strand | ArArGrArGrCrAAG | |
| SNCA-413 | Modified 25mer | rUmGrGmCrUrGrArGrArArGrArCmCrAmAr | 791 |
| | sense strand | ArGrArArCrArAGT | |
| SNCA-414 | Modified 25mer | rGmGrCmUrGrArGrArArGrArCrCmArAmAr | 792 |
| | sense strand | GrArGrArArArGTG | |
| SNCA-415 | Modified 25mer | rGmCrUmGrArGrArArGrArCrCrAmArAmGr | 793 |
| | sense strand | ArGrCrArArGrUGA | |
| SNCA-416 | Modified 25mer | rCmUrGmArGrArArGrArCrCrArAmArGmAr | 794 |
| | sense strand | GrCrArArGrUrGAC | |
| SNCA-417 | Modified 25mer | rUmGrAmGrArArGrArCrCrArArAmGrAmGr | 795 |
| | sense strand | CrArArArUrGrACA | |
| SNCA-418 | Modified 25mer | rGmArGmArArGrArCrCrArArArGmArGmCr | 796 |
| | sense strand | ArArGrArGrArCAA | |
| SNCA-419 | Modified 25mer | rAmGrAmArGrArCrCrArArArGrAmGrCmAr | 797 |
| | sense strand | ArGrUrArArCrAAA | |
| SNCA-420 | Modified 25mer | rGmArAmGrArCrCrArArArGrArGmCrAmAr | 798 |
| | sense strand | GrUrGrArCrArAAT | |
| SNCA-421 | Modified 25mer | rAmArGmArCrCrArArArGrArGrCmArAmGr | 799 |
| | sense strand | UrGrArArArArATG | |
| SNCA-422 | Modified 25mer | rAmGrAmCrCrArArArGrArGrCrAmArGmUr | 800 |
| | sense strand | GrArCrArArArUGT | |
| SNCA-423 | Modified 25mer | rGmArCmCrArArArGrArGrCrArAmGrUmGr | 801 |
| | sense strand | ArCrArArArUrGTT | |
| SNCA-424 | Modified 25mer | rAmCrCmArArArGrArGrCrArArGmUrGmAr | 802 |
| | sense strand | CrArArArUrGrUTG | |
| SNCA-425 | Modified 25mer | rCmCrAmArArGrArGrCrArArGrUmGrAmCr | 803 |
| | sense strand | ArArArArGrUrUGG | |
| SNCA-426 | Modified 25mer | rCmArAmArGrArGrCrArArGrUrGmArCmAr | 804 |
| | sense strand | ArArUrArUrUrGGA | |
| SNCA-427 | Modified 25mer | rAmArAmGrArGrCrArArGrUrGrAmCrAmAr | 805 |
| | sense strand | ArUrGrArUrGrGAG | |
| SNCA-428 | Modified 25mer | rAmArGmArGrCrArArGrUrGrArCmArAmAr | 806 |
| | sense strand | UrGrUrArGrGrAGG | |
| SNCA-429 | Modified 25mer | rAmGrAmGrCrArArGrUrGrArCrAmArAmUr | 807 |
| | sense strand | GrUrUrArGrArGGA | |
| SNCA-430 | Modified 25mer | rGmArGmCrArArGrUrGrArCrArAmArUmGr | 808 |
| | sense strand | UrUrGrArArGrGAG | |
| SNCA-431 | Modified 25mer | rAmGrCmArArGrUrGrArCrArArAmUrGmUr | 809 |
| | sense strand | UrGrGrArGrGrAGC | |
| SNCA-432 | Modified 25mer | rGmCrAmArGrUrGrArCrArArArUmGrUmUr | 810 |
| | sense strand | GrGrArArGrArGCA | |
| SNCA-433 | Modified 25mer | rCmArAmGrUrGrArCrArArArUrGmUrUmGr | 811 |
| | sense strand | GrArGrArArGrCAG | |
| SNCA-434 | Modified 25mer | rAmArGmUrGrArCrArArArUrGrUmUrGmGr | 812 |
| | sense strand | ArGrGrArGrCrAGT | |
| SNCA-435 | Modified 25mer | rAmGrUmGrArCrArArArUrGrUrUmGrGmAr | 813 |
| | sense strand | GrGrArArCrArGTG | |
| SNCA-436 | Modified 25mer | rGmUrGmArCrArArArUrGrUrUrGmGrAmGr | 814 |
| | sense strand | GrArGrArArGrUGG | |
| SNCA-437 | Modified 25mer | rUmGrAmCrArArArUrGrUrUrGrGmArGmGr | 815 |
| | sense strand | ArGrCrArGrUrGGT | |
| SNCA-725 | Modified 25mer | rGmUrAmCrArArGrUrGrCrUrCrAmGrUmUr | 816 |
| | sense strand | CrCrArArUrGrUGC | |
| SNCA-726 | Modified 25mer | rUmArCmArArGrUrGrCrUrCrArGmUrUmCr | 817 |
| | sense strand | CrArArArGrUrGCC | |
| SNCA-727 | Modified 25mer | rAmCrAmArGrUrGrCrUrCrArGrUmUrCmCr | 818 |
| | sense strand | ArArUrArUrGrCCC | |
| SNCA-728 | Modified 25mer | rCmArAmGrUrGrCrUrCrArGrUrUmCrCmAr | 819 |
| | sense strand | ArUrGrArGrCrCCA | |
| SNCA-729 | Modified 25mer | rAmArGmUrGrCrUrCrArGrUrUrCmCrAmAr | 820 |
| | sense strand | UrGrUrArCrCrCAG | |
| SNCA-730 | Modified 25mer | rAmGrUmGrCrUrCrArGrUrUrCrCmArAmUr | 821 |
| | sense strand | GrUrGrArCrCrAGT | |
| SNCA-731 | Modified 25mer | rGmUrGmCrUrCrArGrUrUrCrCrAmArUmGr | 822 |
| | sense strand | UrGrCrArCrArGTC | |
| SNCA-732 | Modified 25mer | rUmGrCmUrCrArGrUrUrCrCrArAmUrGmUr | 823 |
| | sense strand | GrCrCrArArGrUCA | |
| SNCA-733 | Modified 25mer | rGmCrUmCrArGrUrUrCrCrArArUmGrUmGr | 824 |
| | sense strand | CrCrCrArGrUrCAT | |
| SNCA-734 | Modified 25mer | rCmUrCmArGrUrUrCrCrArArUrGmUrGmCr | 825 |
| | sense strand | CrCrArArUrCrATG | |
| SNCA-735 | Modified 25mer | rUmCrAmGrUrUrCrCrArArUrGrUmGrCmCr | 826 |
| | sense strand | CrArGrArCrArUGA | |
| SNCA-736 | Modified 25mer | rCmArGmUrUrCrCrArArUrGrUrGmCrCmCr | 827 |
| | sense strand | ArGrUrArArUrGAC | |
| SNCA-737 | Modified 25mer | rAmGrUmUrCrCrArArUrGrUrGrCmCrCmAr | 828 |
| | sense strand | GrUrCrArUrGrACA | |
| SNCA-738 | Modified 25mer | rGmUrUmCrCrArArUrGrUrGrCrCmCrAmGr | 829 |
| | sense strand | UrCrArArGrArCAT | |
| SNCA-739 | Modified 25mer | rUmUrCmCrArArUrGrUrGrCrCrCmArGmUr | 830 |
| | sense strand | CrArUrArArCrATT | |
| SNCA-740 | Modified 25mer | rUmCrCmArArUrGrUrGrCrCrCrAmGrUmCr | 831 |
| | sense strand | ArUrGrArCrArUTT | |
| SNCA-741 | Modified 25mer | rCmCrAmArUrGrUrGrCrCrCrArGmUrCmAr | 832 |
| | sense strand | UrGrArArArUrUTC | |
| SNCA-742 | Modified 25mer | rCmArAmUrGrUrGrCrCrCrArGrUmCrAmUr | 833 |
| | sense strand | GrArCrArUrUrUCT | |
| SNCA-790 | Modified 25mer | rAmArGmUrCrUrUrCrCrArUrCrAmGrCmAr | 834 |
| | sense strand | GrUrGrArUrUrGAA | |
| SNCA-791 | Modified 25mer | rAmGrUmCrUrUrCrCrArUrCrArGmCrAmGr | 835 |
| | sense strand | UrGrArArUrGrAAG | |
| SNCA-792 | Modified 25mer | rGmUrCmUrUrCrCrArUrCrArGrCmArGmUr | 836 |
| | sense strand | GrArUrArGrArAGT | |
| SNCA-938 | Modified 25mer | rAmArAmArCrArCrCrUrArArGrUmGrAmCr | 837 |
| | sense strand | UrArCrArArCrUTA | |
| SNCA-939 | Modified 25mer | rAmArAmCrArCrCrUrArArGrUrGmArCmUr | 838 |
| | sense strand | ArCrCrArCrUrUAT | |
| SNCA-940 | Modified 25mer | rAmArCmArCrCrUrArArGrUrGrAmCrUmAr | 839 |
| | sense strand | CrCrArArUrUrATT | |
| SNCA-941 | Modified 25mer | rAmCrAmCrCrUrArArGrUrGrArCmUrAmCr | 840 |
| | sense strand | CrArCrArUrArUTT | |
| SNCA-942 | Modified 25mer | rCmArCmCrUrArArGrUrGrArCrUmArCmCr | 841 |
| | sense strand | ArCrUrArArUrUTC | |
| SNCA-943 | Modified 25mer | rAmCrCmUrArArGrUrGrArCrUrAmCrCmAr | 842 |
| | sense strand | CrUrUrArUrUrUCT | |
| SNCA-944 | Modified 25mer | rCmCrUmArArGrUrGrArCrUrArCmCrAmCr | 843 |
| | sense strand | UrUrArArUrUrCTA | |
| SNCA-945 | Modified 25mer | rCmUrAmArGrUrGrArCrUrArCrCmArCmUr | 844 |
| | sense strand | UrArUrArUrCrUAA | |
| SNCA-946 | Modified 25mer | rUmArAmGrUrGrArCrUrArCrCrAmCrUmUr | 845 |
| | sense strand | ArUrUrArCrUrAAA | |
| SNCA-947 | Modified 25mer | rAmArGmUrGrArCrUrArCrCrArCmUrUmAr | 846 |
| | sense strand | UrUrUrArUrArAAT | |
| SNCA-948 | Modified 25mer | rAmGrUmGrArCrUrArCrCrArCrUmUrAmUr | 847 |
| | sense strand | UrUrCrArArArATC | |
| SNCA-949 | Modified 25mer | rGmUrGmArCrUrArCrCrArCrUrUmArUmUr | 848 |
| | sense strand | UrCrUrArArArUCC | |
| SNCA-950 | Modified 25mer | rUmGrAmCrUrArCrCrArCrUrUrAmUrUmUr | 849 |
| | sense strand | CrUrArArArUrCCT | |
| SNCA-951 | Modified 25mer | rGmArCmUrArCrCrArCrUrUrArUmUrUmCr | 850 |
| | sense strand | UrArArArUrCrCTC | |
| SNCA-952 | Modified 25mer | rAmCrUmArCrCrArCrUrUrArUrUmUrCmUr | 851 |
| | sense strand | ArArArArCrCrUCA | |
| SNCA-953 | Modified 25mer | rCmUrAmCrCrArCrUrUrArUrUrUmCrUmAr | 852 |
| | sense strand | ArArUrArCrUrCAC | |
| SNCA-954 | Modified 25mer | rUmArCmCrArCrUrUrArUrUrUrCmUrAmAr | 853 |
| | sense strand | ArUrCrArUrCrACT | |
| SNCA- | Modified 25mer | rUmUrGmUrGrArArArUrUrUrGrUmUrAmA | 854 |
| 1081 | sense strand | rUrArUrArUrArUAA | |
| SNCA- | Modified 25mer | rUmGrUmGrArArArUrUrUrGrUrUmArAmU | 855 |
| 1082 | sense strand | rArUrArArArUrAAT | |
| SNCA- | Modified 25mer | rGmUrGmArArArUrUrUrGrUrUrAmArUmA | 856 |
| 1083 | sense strand | rUrArUrArUrArATA | |
| SNCA- | Modified 25mer | rUmGrAmArArUrUrUrGrUrUrArAmUrAmU | 857 |
| 1084 | sense strand | rArUrArArArArUAC | |
| SNCA- | Modified 25mer | rGmArAmArUrUrUrGrUrUrArArUmArUmA | 858 |
| 1085 | sense strand | rUrArUrArArUrACT | |
| SNCA- | Modified 25mer | rAmCrUmUrGrUrGrUrUrUrGrUrAmUrAmUr | 859 |
| 1188 | sense strand | ArArArArGrGrUGA | |
| SNCA- | Modified 25mer | rCmUrUmGrUrGrUrUrUrGrUrArUmArUmAr | 860 |
| 1189 | sense strand | ArArUrArGrUrGAG | |
| SNCA- | Modified 25mer | rUmUrGmUrGrUrUrUrGrUrArUrAmUrAmA | 86 |
| 1190 | sense strand | rArUrGrArUrGrAGA | |
| SNCA- | Modified 25mer | rUmGrUmGrUrUrUrGrUrArUrArUmArAmA | 862 |
| 1191 | sense strand | rUrGrGrArGrArGAA | |
| SNCA- | Modified 25mer | rGmUrGmUrUrUrGrUrArUrArUrAmArAmU | 863 |
| 1192 | sense strand | rGrGrUrArArGrAAT | |
| SNCA- | Modified 25mer | rUmGrUmUrUrGrUrArUrArUrArAmArUmG | 864 |
| 1193 | sense strand | rGrUrGrArGrArATT | |
| SNCA-225 | Modified 25mer | rUmGrUmGrGrUrGrUrArArArGrGmArAmU | 865 |
| | sense strand | rUrCrArArUrArGCC | |
| SNCA-226 | Modified 25mer | rGmUrGmGrUrGrUrArArArGrGrAmArUmU | 866 |
| | sense strand | rCrArUrArArGrCCA | |
| SNCA-227 | Modified 25mer | rUmGrGmUrGrUrArArArGrGrArAmUrUmCr | 867 |
| | sense strand | ArUrUrArGrCrCAT | |
| SNCA-228 | Modified 25mer | rGmGrUmGrUrArArArGrGrArArUmUrCmAr | 868 |
| | sense strand | UrUrArArCrCrATG | |
| SNCA-229 | Modified 25mer | rGmUrGmUrArArArGrGrArArUrUmCrAmUr | 869 |
| | sense strand | UrArGrArCrArUGG | |
| SNCA-230 | Modified 25mer | rUmGrUmArArArGrGrArArUrUrCmArUmUr | 870 |
| | sense strand | ArGrCrArArUrGGA | |
| SNCA-231 | Modified 25mer | rGmUrAmArArGrGrArArUrUrCrAmUrUmAr | 871 |
| | sense strand | GrCrCrArUrGrGAT | |
| SNCA-232 | Modified 25mer | rUmArAmArGrGrArArUrUrCrArUmUrAmGr | 872 |
| | sense strand | CrCrArArGrGrATG | |
| SNCA-233 | Modified 25mer | rAmArAmGrGrArArUrUrCrArUrUmArGmCr | 873 |
| | sense strand | CrArUrArGrArUGT | |
| SNCA-234 | Modified 25mer | rAmArGmGrArArUrUrCrArUrUrAmGrCmCr | 874 |
| | sense strand | ArUrGrArArUrGTA | |
| SNCA-235 | Modified 25mer | AmGrGmArArUrUrCrArUrUrArGmCrCmAr | 875 |
| | sense strand | UrGrGrArUrGrUAT | |
| SNCA-236 | Modified 25mer | rGmGrAmArUrUrCrArUrUrArGrCmCrAmUr | 876 |
| | sense strand | GrGrArArGrUrATT | |
| SNCA-237 | Modified 25mer | rGmArAmUrUrCrArUrUrArGrCrCmArUmGr | 877 |
| | sense strand | GrArUrArUrArUTC | |
| SNCA-238 | Modified 25mer | rAmArUmUrCrArUrUrArGrCrCrAmUrGmGr | 878 |
| | sense strand | ArUrGrArArUrUCA | |
| SNCA-239 | Modified 25mer | rAmUrUmCrArUrUrArGrCrCrArUmGrGmAr | 879 |
| | sense strand | UrGrUrArUrUrCAT | |
| SNCA-240 | Modified 25mer | rUmUrCmArUrUrArGrCrCrArUrGmGrAmUr | 880 |
| | sense strand | GrUrArArUrCrATG | |
| SNCA-241 | Modified 25mer | rUmCrAmUrUrArGrCrCrArUrGrGmArUmGr | 881 |
| | sense strand | UrArUrArCrArUGA | |
| SNCA-242 | Modified 25mer | rCmArUmUrArGrCrCrArUrGrGrAmUrGmUr | 882 |
| | sense strand | ArUrUrArArUrGAA | |
| SNCA-243 | Modified 25mer | rAmUrUmArGrCrCrArUrGrGrArUmGrUmAr | 883 |
| | sense strand | UrUrCrArUrGrAAA | |
| SNCA-244 | Modified 25mer | rUmUrAmGrCrCrArUrGrGrArUrGmUrAmUr | 884 |
| | sense strand | UrCrArArGrArAAG | |
| SNCA-245 | Modified 25mer | rUmArGmCrCrArUrGrGrArUrGrUmArUmUr | 885 |
| | sense strand | CrArUrArArArAGG | |
| SNCA-246 | Modified 25mer | rAmGrCmCrArUrGrGrArUrGrUrAmUrUmCr | 886 |
| | sense strand | ArUrGrArArArGGA | |
| SNCA-247 | Modified 25mer | rGmCrCmArUrGrGrArUrGrUrArUmUrCmAr | 887 |
| | sense strand | UrGrArArArGrGAC | |
| SNCA-248 | Modified 25mer | rCmCrAmUrGrGrArUrGrUrArUrUmCrAmUr | 888 |
| | sense strand | GrArArArGrGrACT | |
| SNCA-249 | Modified 25mer | rCmArUmGrGrArUrGrUrArUrUrCmArUmGr | 889 |
| | sense strand | ArArArArGrArCTT | |
| SNCA-250 | Modified 25mer | rAmUrGmGrArUrGrUrArUrUrCrAmUrGmAr | 890 |
| | sense strand | ArArGrArArCrUTT | |
| SNCA-251 | Modified 25mer | rUmGrGmArUrGrUrArUrUrCrArUmGrAmAr | 891 |
| | sense strand | ArGrGrArCrUrUTC | |
| SNCA-252 | Modified 25mer | rGmGrAmUrGrUrArUrUrCrArUrGmArAmAr | 892 |
| | sense strand | GrGrArArUrUrUCA | |
| SNCA-253 | Modified 25mer | rGmArUmGrUrArUrUrCrArUrGrAmArAmGr | 893 |
| | sense strand | GrArCrArUrUrCAA | |
| SNCA-254 | Modified 25mer | rAmUrGmUrArUrUrCrArUrGrArAmArGmGr | 894 |
| | sense strand | ArCrUrArUrCrAAA | |
| SNCA-256 | Modified 25mer | rGmUrAmUrUrCrArUrGrArArArGmGrAmCr | 895 |
| | sense strand | UrUrUrArArArAGG | |
| SNCA-330 | Modified 25mer | rAmGrAmArGrCrArGrCrArGrGrAmArAmGr | 896 |
| | sense strand | ArCrArArArArGAG | |
| SNCA-335 | Modified 25mer | rCmArGmCrArGrGrArArArGrArCmArAmAr | 897 |
| | sense strand | ArGrArArGrGrUGT | |
| SNCA-337 | Modified 25mer | rGmCrAmGrGrArArArGrArCrArAmArAmGr | 898 |
| | sense strand | ArGrGrArUrGrUTC | |
| SNCA-341 | Modified 25mer | rGmArAmArGrArCrArArArArGrAmGrGmGr | 899 |
| | sense strand | UrGrUrArCrUrCTA | |
| SNCA-342 | Modified 25mer | rAmArAmGrArCrArArArArGrArGmGrGmUr | 900 |
| | sense strand | GrUrUrArUrCrUAT | |
| SNCA-344 | Modified 25mer | rAmGrAmCrArArArArGrArGrGrGmUrGmUr | 901 |
| | sense strand | UrCrUrArUrArUGT | |
| SNCA-345 | Modified 25mer | rGmArCmArArArArGrArGrGrGrUmGrUmUr | 902 |
| | sense strand | CrUrCrArArUrGTA | |
| SNCA-351 | Modified 25mer | rAmGrAmGrGrGrUrGrUrUrCrUrCmUrAmUr | 903 |
| | sense strand | GrUrArArGrCrUCC | |
| SNCA-353 | Modified 25mer | rAmGrGmGrUrGrUrUrCrUrCrUrAmUrGmUr | 904 |
| | sense strand | ArGrGrArUrCrCAA | |
| SNCA-355 | Modified 25mer | rGmGrUmGrUrUrCrUrCrUrArUrGmUrAmGr | 905 |
| | sense strand | GrCrUrArCrArAAA | |
| SNCA-638 | Modified 25mer | rAmGrGmArArGrGrGrUrArUrCrAmArGmAr | 906 |
| | sense strand | CrUrArArGrArACC | |
| SNCA-641 | Modified 25mer | rAmArGmGrGrUrArUrCrArArGrAmCrUmAr | 907 |
| | sense strand | CrGrArArCrCrUGA | |
| SNCA-642 | Modified 25mer | rAmGrGmGrUrArUrCrArArGrArCmUrAmCr | 908 |
| | sense strand | GrArArArCrUrGAA | |
| SNCA-647 | Modified 25mer | rAmUrCmArArGrArCrUrArCrGrAmArCmCr | 909 |
| | sense strand | UrGrArArGrCrCTA | |
| SNCA-648 | Modified 25mer | rUmCrAmArGrArCrUrArCrGrArAmCrCmUr | 910 |
| | sense strand | GrArArArCrCrUAA | |
| SNCA-650 | Modified 25mer | rAmArGmArCrUrArCrGrArArCrCmUrGmAr | 911 |
| | sense strand | ArGrCrArUrArAGA | |
| SNCA-652 | Modified 25mer | rGmArCmUrArCrGrArArCrCrUrGmArAmGr | 912 |
| | sense strand | CrCrUrArArGrAAA | |
| SNCA-653 | Modified 25mer | rAmCrUmArCrGrArArCrCrUrGrAmArGmCr | 913 |
| | sense strand | CrUrArArGrArAAT | |
| SNCA-654 | Modified 25mer | rCmUrAmCrGrArArCrCrUrGrArAmGrCmCr | 914 |
| | sense strand | UrArArArArArATA | |
| SNCA-656 | Modified 25mer | rAmCrGmArArCrCrUrGrArArGrCmCrUmAr | 915 |
| | sense strand | ArGrArArArUrATC | |
| SNCA-657 | Modified 25mer | rCmGrAmArCrCrUrGrArArGrCrCmUrAmAr | 916 |
| | sense strand | GrArArArUrArUCT | |
| SNCA-659 | Modified 25mer | rAmArCmCrUrGrArArGrCrCrUrAmArGmAr | 917 |
| | sense strand | ArArUrArUrCrUTT | |
| SNCA-660 | Modified 25mer | rAmCrCmUrGrArArGrCrCrUrArAmGrAmAr | 918 |
| | sense strand | ArUrArArCrUrUTG | |
| SNCA-661 | Modified 25mer | rCmCrUmGrArArGrCrCrUrArArGmArAmAr | 919 |
| | sense strand | UrArUrArUrUrUGC | |
| SNCA-662 | Modified 25mer | rCmUrGmArArGrCrCrUrArArGrAmArAmUr | 920 |
| | sense strand | ArUrCrArUrUrGCT | |
| SNCA-663 | Modified 25mer | rUmGrAmArGrCrCrUrArArGrArAmArUmAr | 921 |
| | sense strand | UrCrUrArUrGrCTC | |
| SNCA-668 | Modified 25mer | rCmCrUmArArGrArArArUrArUrCmUrUmUr | 922 |
| | sense strand | GrCrUrArCrCrAGT | |
| SNCA-669 | Modified 25mer | rCmUrAmArGrArArArUrArUrCrUmUrUmGr | 923 |
| | sense strand | CrUrCrArCrArGTT | |
| SNCA-672 | Modified 25mer | rAmGrAmArArUrArUrCrUrUrUrGmCrUmCr | 924 |
| | sense strand | CrCrArArUrUrUCT | |
| SNCA-675 | Modified 25mer | rAmArUmArUrCrUrUrUrGrCrUrCmCrCmAr | 925 |
| | sense strand | GrUrUrArCrUrUGA | |
| SNCA-676 | Modified 25mer | rAmUrAmUrCrUrUrUrGrCrUrCrCmCrAmGr | 926 |
| | sense strand | UrUrUrArUrUrGAG | |
| SNCA-689 | Modified 25mer | rCmArGmUrUrUrCrUrUrGrArGrAmUrCmUr | 927 |
| | sense strand | GrCrUrArArCrAGA | |
| SNCA-724 | Modified 25mer | rUmGrUmArCrArArGrUrGrCrUrCmArGmUr | 928 |
| | sense strand | UrCrCrArArUrGTG | |
| SNCA-744 | Modified 25mer | rAmUrGmUrGrCrCrCrArGrUrCrAmUrGmAr | 929 |
| | sense strand | CrArUrArUrCrUCA | |
| SNCA-745 | Modified 25mer | rUmGrUmGrCrCrCrArGrUrCrArUmGrAmCr | 930 |
| | sense strand | ArUrUrArCrUrCAA | |
| SNCA-746 | Modified 25mer | rGmUrGmCrCrCrArGrUrCrArUrGmArCmAr | 931 |
| | sense strand | UrUrUrArUrCrAAA | |
| SNCA-751 | Modified 25mer | rCmArGmUrCrArUrGrArCrArUrUmUrCmUr | 932 |
| | sense strand | CrArArArGrUrUTT | |
| SNCA-752 | Modified 25mer | rAmGrUmCrArUrGrArCrArUrUrUmCrUmCr | 933 |
| | sense strand | ArArArArUrUrUTT | |
| SNCA-753 | Modified 25mer | rGmUrCmArUrGrArCrArUrUrUrCmUrCmAr | 934 |
| | sense strand | ArArGrArUrUrUTA | |
| SNCA-754 | Modified 25mer | rUmCrAmUrGrArCrArUrUrUrCrUmCrAmAr | 935 |
| | sense strand | ArGrUrArUrUrUAC | |
| SNCA-755 | Modified 25mer | rCmArUmGrArCrArUrUrUrCrUrCmArAmAr | 936 |
| | sense strand | GrUrUrArUrUrACA | |
| SNCA-756 | Modified 25mer | rAmUrGmArCrArUrUrUrCrUrCrAmArAmGr | 937 |
| | sense strand | UrUrUrArUrArCAG | |
| SNCA-757 | Modified 25mer | rUmGrAmCrArUrUrUrCrUrCrArAmArGmUr | 938 |
| | sense strand | UrUrUrArArCrAGT | |
| SNCA-758 | Modified 25mer | rGmArCmArUrUrUrCrUrCrArArAmGrUmUr | 939 |
| | sense strand | UrUrUrArCrArGTG | |
| SNCA-759 | Modified 25mer | rAmCrAmUrUrUrCrUrCrArArArGmUrUmUr | 940 |
| | sense strand | UrUrArArArGrUGT | |
| SNCA-760 | Modified 25mer | rCmArUmUrUrCrUrCrArArArGrUmUrUmUr | 941 |
| | sense strand | UrArCrArGrUrGTA | |
| SNCA-761 | Modified 25mer | rAmUrUmUrCrUrCrArArArGrUrUmUrUmUr | 942 |
| | sense strand | ArCrArArUrGrUAT | |
| SNCA-762 | Modified 25mer | rUmUrUmCrUrCrArArArGrUrUrUmUrUmAr | 943 |
| | sense strand | CrArGrArGrUrATC | |
| SNCA-789 | Modified 25mer | rGmArAmGrUrCrUrUrCrCrArUrCmArGmCr | 944 |
| | sense strand | ArGrUrArArUrUGA | |
| SNCA-795 | Modified 25mer | rUmUrCmCrArUrCrArGrCrArGrUmGrAmUr | 945 |
| | sense strand | UrGrArArGrUrATC | |
| SNCA-796 | Modified 25mer | rUmCrCmArUrCrArGrCrArGrUrGmArUmUr | 946 |
| | sense strand | GrArArArUrArUCT | |
| SNCA-797 | Modified 25mer | rCmCrAmUrCrArGrCrArGrUrGrAmUrUmGr | 947 |
| | sense strand | ArArGrArArUrCTG | |
| SNCA-798 | Modified 25mer | rCmArUmCrArGrCrArGrUrGrArUmUrGmAr | 948 |
| | sense strand | ArGrUrArUrCrUGT | |
| SNCA-799 | Modified 25mer | rAmUrCmArGrCrArGrUrGrArUrUmGrAmAr | 949 |
| | sense strand | GrUrArArCrUrGTA | |
| SNCA-800 | Modified 25mer | rUmCrAmGrCrArGrUrGrArUrUrGmArAmGr | 950 |
| | sense strand | UrArUrArUrGrUAC | |
| SNCA-801 | Modified 25mer | rCmArGmCrArGrUrGrArUrUrGrAmArGmUr | 951 |
| | sense strand | ArUrCrArGrUrACC | |
| SNCA-802 | Modified 25mer | rAmGrCmArGrUrGrArUrUrGrArAmGrUmAr | 952 |
| | sense strand | UrCrUrArUrArCCT | |
| SNCA-803 | Modified 25mer | rGmCrAmGrUrGrArUrUrGrArArGmUrAmUr | 953 |
| | sense strand | CrUrGrArArCrCTG | |
| SNCA-804 | Modified 25mer | rCmArGmUrGrArUrUrGrArArGrUmArUmCr | 954 |
| | sense strand | UrGrUrArCrCrUGC | |
| SNCA-805 | Modified 25mer | rAmGrUmGrArUrUrGrArArGrUrAmUrCmUr | 955 |
| | sense strand | GrUrArArCrUrGCC | |
| SNCA-809 | Modified 25mer | rAmUrUmGrArArGrUrArUrCrUrGmUrAmCr | 956 |
| | sense strand | CrUrGrArCrCrCCA | |
| SNCA-839 | Modified 25mer | rCmArUmUrUrCrGrGrUrGrCrUrUmCrCmCr | 957 |
| | sense strand | UrUrUrArArCrUGA | |
| SNCA-844 | Modified 25mer | rCmGrGmUrGrCrUrUrCrCrCrUrUmUrCmAr | 958 |
| | sense strand | CrUrGrArArGrUGA | |
| SNCA-845 | Modified 25mer | rGmGrUmGrCrUrUrCrCrCrUrUrUmCrAmCr | 959 |
| | sense strand | UrGrArArGrUrGAA | |
| SNCA-846 | Modified 25mer | rGmUrGmCrUrUrCrCrCrUrUrUrCmArCmUr | 960 |
| | sense strand | GrArArArUrGrAAT | |
| SNCA-847 | Modified 25mer | rUmGrCmUrUrCrCrCrUrUrUrCrAmCrUmGr | 961 |
| | sense strand | ArArGrArGrArATA | |
| SNCA-848 | Modified 25mer | rGmCrUmUrCrCrCrUrUrUrCrArCmUrGmAr | 962 |
| | sense strand | ArGrUrArArArUAC | |
| SNCA-849 | Modified 25mer | rCmUrUmCrCrCrUrUrUrCrArCrUmGrAmAr | 963 |
| | sense strand | GrUrGrArArUrACA | |
| SNCA-850 | Modified 25mer | rUmUrCmCrCrUrUrUrCrArCrUrGmArAmGr | 964 |
| | sense strand | UrGrArArUrArCAT | |
| SNCA-851 | Modified 25mer | rUmCrCmCrUrUrUrCrArCrUrGrAmArGmUr | 965 |
| | sense strand | GrArArArArCrATG | |
| SNCA-852 | Modified 25mer | rCmCrCmUrUrUrCrArCrUrGrArAmGrUmGr | 966 |
| | sense strand | ArArUrArCrArUGG | |
| SNCA-853 | Modified 25mer | rCmCrUmUrUrCrArCrUrGrArArGmUrGmAr | 967 |
| | sense strand | ArUrArArArUrGGT | |
| SNCA-854 | Modified 25mer | rCmUrUmUrCrArCrUrGrArArGrUmGrAmAr | 968 |
| | sense strand | UrArCrArUrGrGTA | |
| SNCA-855 | Modified 25mer | rUmUrUmCrArCrUrGrArArGrUrGmArAmUr | 969 |
| | sense strand | ArCrArArGrGrUAG | |
| SNCA-856 | Modified 25mer | rUmUrCmArCrUrGrArArGrUrGrAmArUmAr | 970 |
| | sense strand | CrArUrArGrUrAGC | |
| SNCA-857 | Modified 25mer | rUmCrAmCrUrGrArArGrUrGrArAmUrAmCr | 971 |
| | sense strand | ArUrGrArUrArGCA | |
| SNCA-858 | Modified 25mer | rCmArCmUrGrArArGrUrGrArArUmArCmAr | 972 |
| | sense strand | UrGrGrArArGrCAG | |
| SNCA-859 | Modified 25mer | rAmCrUmGrArArGrUrGrArArUrAmCrAmUr | 973 |
| | sense strand | GrGrUrArGrCrAGG | |
| SNCA-860 | Modified 25mer | rCmUrGmArArGrUrGrArArUrArCmArUmGr | 974 |
| | sense strand | GrUrArArCrArGGG | |
| SNCA-861 | Modified 25mer | rUmGrAmArGrUrGrArArUrArCrAmUrGmGr | 975 |
| | sense strand | UrArGrArArGrGGT | |
| SNCA-863 | Modified 25mer | rAmArGmUrGrArArUrArCrArUrGmGrUmAr | 976 |
| | sense strand | GrCrArArGrGrUCT | |
| SNCA-864 | Modified 25mer | rAmGrUmGrArArUrArCrArUrGrGmUrAmGr | 977 |
| | sense strand | CrArGrArGrUrCTT | |
| SNCA-865 | Modified 25mer | rGmUrGmArArUrArCrArUrGrGrUmArGmCr | 978 |
| | sense strand | ArGrGrArUrCrUTT | |
| SNCA-867 | Modified 25mer | rGmArAmUrArCrArUrGrGrUrArGmCrAmGr | 979 |
| | sense strand | GrGrUrArUrUrUGT | |
| SNCA-868 | Modified 25mer | rAmArUmArCrArUrGrGrUrArGrCmArGmGr | 980 |
| | sense strand | GrUrCrArUrUrGTG | |
| SNCA-875 | Modified 25mer | rGmGrUmArGrCrArGrGrGrUrCrUmUrUmGr | 981 |
| | sense strand | UrGrUrArCrUrGTG | |
| SNCA-881 | Modified 25mer | rAmGrGmGrUrCrUrUrUrGrUrGrUmGrCmUr | 982 |
| | sense strand | GrUrGrArArUrUTT | |
| SNCA-883 | Modified 25mer | rGmGrUmCrUrUrUrGrUrGrUrGrCmUrGmUr | 983 |
| | sense strand | GrGrArArUrUrUGT | |
| SNCA-889 | Modified 25mer | rUmGrUmGrUrGrCrUrGrUrGrGrAmUrUmUr | 984 |
| | sense strand | UrGrUrArGrCrUTC | |
| SNCA-890 | Modified 25mer | rGmUrGmUrGrCrUrGrUrGrGrArUmUrUmUr | 985 |
| | sense strand | GrUrGrArCrUrUCA | |
| SNCA-891 | Modified 25mer | rUmGrUmGrCrUrGrUrGrGrArUrUmUrUmGr | 986 |
| | sense strand | UrGrGrArUrUrCAA | |
| SNCA-892 | Modified 25mer | rGmUrGmCrUrGrUrGrGrArUrUrUmUrGmUr | 987 |
| | sense strand | GrGrCrArUrCrAAT | |
| SNCA-893 | Modified 25mer | rUmGrCmUrGrUrGrGrArUrUrUrUmGrUmGr | 988 |
| | sense strand | GrCrUrArCrArATC | |
| SNCA-894 | Modified 25mer | rGmCrUmGrUrGrGrArUrUrUrUrGmUrGmGr | 989 |
| | sense strand | CrUrUrArArArUCT | |
| SNCA-895 | Modified 25mer | rCmUrGmUrGrGrArUrUrUrUrGrUmGrGmCr | 990 |
| | sense strand | UrUrCrArArUrCTA | |
| SNCA-897 | Modified 25mer | rGmUrGmGrArUrUrUrUrGrUrGrGmCrUmUr | 991 |
| | sense strand | CrArArArCrUrACG | |
| SNCA-898 | Modified 25mer | rUmGrGmArUrUrUrUrGrUrGrGrCmUrUmCr | 992 |
| | sense strand | ArArUrArUrArCGA | |
| SNCA-900 | Modified 25mer | rGmArUmUrUrUrGrUrGrGrCrUrUmCrAmAr | 993 |
| | sense strand | UrCrUrArCrGrATG | |
| SNCA-901 | Modified 25mer | rAmUrUmUrUrGrUrGrGrCrUrUrCmArAmUr | 994 |
| | sense strand | CrUrArArGrArUGT | |
| SNCA-956 | Modified 25mer | rCmCrAmCrUrUrArUrUrUrCrUrAmArAmUr | 995 |
| | sense strand | CrCrUrArArCrUAT | |
| SNCA-957 | Modified 25mer | rCmArCmUrUrArUrUrUrCrUrArAmArUmCr | 996 |
| | sense strand | CrUrCrArCrUrATT | |
| SNCA-958 | Modified 25mer | rAmCrUmUrArUrUrUrCrUrArArAmUrCmCr | 997 |
| | sense strand | UrCrArArUrArUTT | |
| SNCA-959 | Modified 25mer | rCmUrUmArUrUrUrCrUrArArArUmCrCmUr | 998 |
| | sense strand | CrArCrArArUrUTT | |
| SNCA-961 | Modified 25mer | rUmArUmUrUrCrUrArArArUrCrCmUrCmAr | 999 |
| | sense strand | CrUrArArUrUrUTT | |
| SNCA-962 | Modified 25mer | rAmUrUmUrCrUrArArArUrCrCrUmCrAmCr | 1000 |
| | sense strand | UrArUrArUrUrUTT | |
| SNCA-963 | Modified 25mer | rUmUrUmCrUrArArArUrCrCrUrCmArCmUr | 1001 |
| | sense strand | ArUrUrArUrUrUTG | |
| SNCA-964 | Modified 25mer | rUmUrCmUrArArArUrCrCrUrCrAmCrUmAr | 1002 |
| | sense strand | UrUrUrArUrUrUGT | |
| SNCA-965 | Modified 25mer | rUmCrUmArArArUrCrCrUrCrArCmUrAmUr | 1003 |
| | sense strand | UrUrUrArUrUrGTT | |
| SNCA-966 | Modified 25mer | rCmUrAmArArUrCrCrUrCrArCrUmArUmUr | 1004 |
| | sense strand | UrUrUrArUrGrUTG | |
| SNCA-967 | Modified 25mer | rUmArAmArUrCrCrUrCrArCrUrAmUrUmUr | 1005 |
| | sense strand | UrUrUrArGrUrUGC | |
| SNCA-968 | Modified 25mer | rAmArAmUrCrCrUrCrArCrUrArUmUrUmUr | 1006 |
| | sense strand | UrUrUrArUrUrGCT | |
| SNCA-969 | Modified 25mer | rAmArUmCrCrUrCrArCrUrArUrUmUrUmUr | 1007 |
| | sense strand | UrUrGrArUrGrCTG | |
| SNCA-970 | Modified 25mer | rAmUrCmCrUrCrArCrUrArUrUrUmUrUmUr | 1008 |
| | sense strand | UrGrUrArGrCrUGT | |
| SNCA-971 | Modified 25mer | rUmCrCmUrCrArCrUrArUrUrUrUmUrUmUr | 1009 |
| | sense strand | GrUrUrArCrUrGTT | |
| SNCA-972 | Modified 25mer | rCmCrUmCrArCrUrArUrUrUrUrUmUrUmGr | 1010 |
| | sense strand | UrUrGrArUrGrUTG | |
| SNCA-973 | Modified 25mer | rCmUrCmArCrUrArUrUrUrUrUrUmUrGmUr | 1011 |
| | sense strand | UrGrCrArGrUrUGT | |
| SNCA-974 | Modified 25mer | rUmCrAmCrUrArUrUrUrUrUrUrUmGrUmUr | 1012 |
| | sense strand | GrCrUrArUrUrGTT | |
| SNCA-975 | Modified 25mer | rCmArCmUrArUrUrUrUrUrUrUrGmUrUmGr | 1013 |
| | sense strand | CrUrGrArUrGrUTC | |
| SNCA-976 | Modified 25mer | rAmCrUmArUrUrUrUrUrUrUrGrUmUrGmCr | 1014 |
| | sense strand | UrGrUrArGrUrUCA | |
| SNCA-977 | Modified 25mer | rCmUrAmUrUrUrUrUrUrUrGrUrUmGrCmUr | 1015 |
| | sense strand | GrUrUrArUrUrCAG | |
| SNCA-978 | Modified 25mer | rUmArUmUrUrUrUrUrUrGrUrUrGmCrUmGr | 1016 |
| | sense strand | UrUrGrArUrCrAGA | |
| SNCA-979 | Modified 25mer | rAmUrUmUrUrUrUrUrGrUrUrGrCmUrGmUr | 1017 |
| | sense strand | UrGrUrArCrArGAA | |
| SNCA-980 | Modified 25mer | rUmUrUmUrUrUrUrGrUrUrGrCrUmGrUmUr | 1018 |
| | sense strand | GrUrUrArArGrAAG | |
| SNCA-981 | Modified 25mer | rUmUrUmUrUrUrGrUrUrGrCrUrGmUrUmGr | 1019 |
| | sense strand | UrUrCrArGrArAGT | |
| SNCA-982 | Modified 25mer | rUmUrUmUrUrGrUrUrGrCrUrGrUmUrGmUr | 1020 |
| | sense strand | UrCrArArArArGTT | |
| SNCA-983 | Modified 25mer | rUmUrUmUrGrUrUrGrCrUrGrUrUmGrUmUr | 1021 |
| | sense strand | CrArGrArArGrUTG | |
| SNCA-984 | Modified 25mer | rUmUrUmGrUrUrGrCrUrGrUrUrGmUrUmCr | 1022 |
| | sense strand | ArGrArArGrUrUGT | |
| SNCA-985 | Modified 25mer | rUmUrGmUrUrGrCrUrGrUrUrGrUmUrCmAr | 1023 |
| | sense strand | GrArArArUrUrGTT | |
| SNCA-986 | Modified 25mer | rUmGrUmUrGrCrUrGrUrUrGrUrUmCrAmGr | 1024 |
| | sense strand | ArArGrArUrGrUTA | |
| SNCA-987 | Modified 25mer | rGmUrUmGrCrUrGrUrUrGrUrUrCmArGmAr | 1025 |
| | sense strand | ArGrUrArGrUrUAG | |
| SNCA-988 | Modified 25mer | rUmUrGmCrUrGrUrUrGrUrUrCrAmGrAmAr | 1026 |
| | sense strand | GrUrUrArUrUrAGT | |
| SNCA-989 | Modified 25mer | rUmGrCmUrGrUrUrGrUrUrCrArGmArAmGr | 1027 |
| | sense strand | UrUrGrArUrArGTG | |
| SNCA-990 | Modified 25mer | rGmCrUmGrUrUrGrUrUrCrArGrAmArGmUr | 1028 |
| | sense strand | UrGrUrArArGrUGA | |
| SNCA-991 | Modified 25mer | rCmUrGmUrUrGrUrUrCrArGrArAmGrUmUr | 1029 |
| | sense strand | GrUrUrArGrUrGAT | |
| SNCA-992 | Modified 25mer | rUmGrUmUrGrUrUrCrArGrArArGmUrUmGr | 1030 |
| | sense strand | UrUrArArUrGrATT | |
| SNCA-993 | Modified 25mer | rGmUrUmGrUrUrCrArGrArArGrUmUrGmUr | 1031 |
| | sense strand | UrArGrArGrArUTT | |
| SNCA-994 | Modified 25mer | rUmUrGmUrUrCrArGrArArGrUrUmGrUmUr | 1032 |
| | sense strand | ArGrUrArArUrUTG | |
| SNCA-995 | Modified 25mer | rUmGrUmUrCrArGrArArGrUrUrGmUrUmAr | 1033 |
| | sense strand | GrUrGrArUrUrUGC | |
| SNCA-996 | Modified 25mer | rGmUrUmCrArGrArArGrUrUrGrUmUrAmGr | 1034 |
| | sense strand | UrGrArArUrUrGCT | |
| SNCA-997 | Modified 25mer | rUmUrCmArGrArArGrUrUrGrUrUmArGmUr | 1035 |
| | sense strand | GrArUrArUrGrCTA | |
| SNCA-998 | Modified 25mer | rUmCrAmGrArArGrUrUrGrUrUrAmGrUmGr | 1036 |
| | sense strand | ArUrUrArGrCrUAT | |
| SNCA-999 | Modified 25mer | rCmArGmArArGrUrUrGrUrUrArGmUrGmAr | 1037 |
| | sense strand | UrUrUrArCrUrATC | |
| SNCA- | Modified 25mer | rAmGrAmArGrUrUrGrUrUrArGrUmGrAmU | 1038 |
| 1000 | sense strand | rUrUrGrArUrArUCA | |
| SNCA- | Modified 25mer | rGmArAmGrUrUrGrUrUrArGrUrGmArUmU | 1039 |
| 1001 | sense strand | rUrGrCrArArUrCAT | |
| SNCA- | Modified 25mer | rAmArGmUrUrGrUrUrArGrUrGrAmUrUmU | 1040 |
| 1002 | sense strand | rGrCrUrArUrCrATA | |
| SNCA- | Modified 25mer | rAmGrUmUrGrUrUrArGrUrGrArUmUrUmG | 1041 |
| 1003 | sense strand | rCrUrArArCrArUAT | |
| SNCA- | Modified 25mer | rGmUrUmGrUrUrArGrUrGrArUrUmUrGmCr | 1042 |
| 1004 | sense strand | UrArUrArArUrATA | |
| SNCA- | Modified 25mer | rUmUrGmUrUrArGrUrGrArUrUrUmGrCmUr | 1043 |
| 1005 | sense strand | ArUrCrArUrArUAT | |
| SNCA- | Modified 25mer | rAmUrUmArUrArArGrArUrUrUrUmUrAmG | 1044 |
| 1028 | sense strand | rGrUrGrArCrUrUTT | |
| SNCA- | Modified 25mer | rUmUrAmUrArArGrArUrUrUrUrUmArGmG | 1045 |
| 1029 | sense strand | rUrGrUrArUrUrUTA | |
| SNCA- | Modified 25mer | rUmArUmArArGrArUrUrUrUrUrAmGrGmU | 1046 |
| 1030 | sense strand | rGrUrCrArUrUrUAA | |
| SNCA- | Modified 25mer | rAmUrAmArGrArUrUrUrUrUrArGmGrUmG | 1047 |
| 1031 | sense strand | rUrCrUrArUrUrAAT | |
| SNCA- | Modified 25mer | rUmArAmGrArUrUrUrUrUrArGrGmUrGmU | 1048 |
| 1032 | sense strand | rCrUrUrArUrArATG | |
| SNCA- | Modified 25mer | rAmArGmArUrUrUrUrUrArGrGrUmGrUmCr | 1049 |
| 1033 | sense strand | UrUrUrArArArUGA | |
| SNCA- | Modified 25mer | rAmGrAmUrUrUrUrUrArGrGrUrGmUrCmUr | 1050 |
| 1034 | sense strand | UrUrUrArArUrGAT | |
| SNCA- | Modified 25mer | rGmArUmUrUrUrUrArGrGrUrGrUmCrUmUr | 1051 |
| 1035 | sense strand | UrUrArArUrGrATA | |
| SNCA- | Modified 25mer | rAmUrUmUrUrUrArGrGrUrGrUrCmUrUmUr | 1052 |
| 1036 | sense strand | UrArArArGrArUAC | |
| SNCA- | Modified 25mer | rUmUrUmUrUrArGrGrUrGrUrCrUmUrUmUr | 1053 |
| 1037 | sense strand | ArArUrArArUrACT | |
| SNCA- | Modified 25mer | rUmUrUmUrArGrGrUrGrUrCrUrUmUrUmAr | 1054 |
| 1038 | sense strand | ArUrGrArUrArCTG | |
| SNCA- | Modified 25mer | rUmUrUmArGrGrUrGrUrCrUrUrUmUrAmAr | 1055 |
| 1039 | sense strand | UrGrArArArCrUGT | |
| SNCA- | Modified 25mer | rUmUrAmGrGrUrGrUrCrUrUrUrUmArAmUr | 1056 |
| 1040 | sense strand | GrArUrArCrUrGTC | |
| SNCA- | Modified 25mer | rUmArGmGrUrGrUrCrUrUrUrUrAmArUmGr | 1057 |
| 1041 | sense strand | ArUrArArUrGrUCT | |
| SNCA- | Modified 25mer | rAmGrGmUrGrUrCrUrUrUrUrArAmUrGmAr | 1058 |
| 1042 | sense strand | UrArCrArGrUrCTA | |
| SNCA- | Modified 25mer | rGmGrUmGrUrCrUrUrUrUrArArUmGrAmUr | 1059 |
| 1043 | sense strand | ArCrUrArUrCrUAA | |
| SNCA- | Modified 25mer | rGmUrGmUrCrUrUrUrUrArArUrGmArUmAr | 1060 |
| 1044 | sense strand | CrUrGrArCrUrAAG | |
| SNCA- | Modified 25mer | rUmGrUmCrUrUrUrUrArArUrGrAmUrAmCr | 1061 |
| 1045 | sense strand | UrGrUrArUrArAGA | |
| SNCA- | Modified 25mer | rGmUrCmUrUrUrUrArArUrGrArUmArCmUr | 1062 |
| 1046 | sense strand | GrUrCrArArArGAA | |
| SNCA- | Modified 25mer | rUmCrUmUrUrUrArArUrGrArUrAmCrUmGr | 1063 |
| 1047 | sense strand | UrCrUrArArGrAAT | |
| SNCA- | Modified 25mer | rCmUrUmUrUrArArUrGrArUrArCmUrGmUr | 1064 |
| 1048 | sense strand | CrUrArArGrArATA | |
| SNCA- | Modified 25mer | rUmUrUmUrArArUrGrArUrArCrUmGrUmCr | 1065 |
| 1049 | sense strand | UrArArArArArUAA | |
| SNCA- | Modified 25mer | rUmUrUmArArUrGrArUrArCrUrGmUrCmUr | 1066 |
| 1050 | sense strand | ArArGrArArUrAAT | |
| SNCA- | Modified 25mer | rUmUrAmArUrGrArUrArCrUrGrUmCrUmAr | 1067 |
| 1051 | sense strand | ArGrArArUrArATG | |
| SNCA- | Modified 25mer | rUmArAmUrGrArUrArCrUrGrUrCmUrAmAr | 1068 |
| 1052 | sense strand | GrArArArArArUGA | |
| SNCA- | Modified 25mer | rAmArUmGrArUrArCrUrGrUrCrUmArAmGr | 1069 |
| 1053 | sense strand | ArArUrArArUrGAC | |
| SNCA- | Modified 25mer | AmUrGmArUrArCrUrGrUrCrUrAmArGmAr | 1070 |
| 1054 | sense strand | ArUrArArUrGrACG | |
| SNCA- | Modified 25mer | rUmGrAmUrArCrUrGrUrCrUrArAmGrAmAr | 1071 |
| 1055 | sense strand | UrArArArGrArCGT | |
| SNCA- | Modified 25mer | rGmArUmArCrUrGrUrCrUrArArGmArAmUr | 1072 |
| 1056 | sense strand | ArArUrArArCrGTA | |
| SNCA- | Modified 25mer | rAmUrAmCrUrGrUrCrUrArArGrAmArUmAr | 1073 |
| 1057 | sense strand | ArUrGrArCrGrUAT | |
| SNCA- | Modified 25mer | rUmArCmUrGrUrCrUrArArGrArAmUrAmAr | 1074 |
| 1058 | sense strand | UrGrArArGrUrATT | |
| SNCA- | Modified 25mer | rGmUrAmUrUrGrUrGrArArArUrUmUrGmU | 1075 |
| 1078 | sense strand | rUrArArArArUrATA | |
| SNCA- | Modified 25mer | rUmArUmUrGrUrGrArArArUrUrUmGrUmU | 1076 |
| 1079 | sense strand | rArArUrArUrArUAT | |
| SNCA- | Modified 25mer | rAmUrUmGrUrGrArArArUrUrUrGmUrUmA | 1077 |
| 1080 | sense strand | rArUrArArArUrATA | |
| SNCA- | Modified 25mer | rAmArAmUrUrUrGrUrUrArArUrAmUrAmU | 1078 |
| 1086 | sense strand | rArUrArArUrArCTT | |
| SNCA- | Modified 25mer | rAmArUmUrUrGrUrUrArArUrArUmArUmA | 1079 |
| 1087 | sense strand | rUrArArArArCrUTA | |
| SNCA- | Modified 25mer | rAmUrUmUrGrUrUrArArUrArUrAmUrAmU | 1080 |
| 1088 | sense strand | rArArUrArCrUrUAA | |
| SNCA- | Modified 25mer | rUmUrUmGrUrUrArArUrArUrArUmArUmA | 1081 |
| 1089 | sense strand | rArUrArArUrUrAAA | |
| SNCA- | Modified 25mer | rUmUrGmUrUrArArUrArUrArUrAmUrAmA | 1082 |
| 1090 | sense strand | rUrArCrArUrArAAA | |
| SNCA- | Modified 25mer | rUmGrUmUrArArUrArUrArUrArUmArAmU | 1083 |
| 1091 | sense strand | rArCrUrArArArAAA | |
| SNCA- | Modified 25mer | rGmUrUmArArUrArUrArUrArUrAmArUmA | 1084 |
| 1092 | sense strand | rCrUrUrArArArAAT | |
| SNCA- | Modified 25mer | rUmUrAmArUrArUrArUrArUrArAmUrAmCr | 1085 |
| 1093 | sense strand | UrUrArArArArATA | |
| SNCA- | Modified 25mer | rUmArUmGrUrGrArGrCrArUrGrAmArAmCr | 1086 |
| 1116 | sense strand | UrArUrArCrArCCT | |
| SNCA- | Modified 25mer | rAmUrGmUrGrArGrCrArUrGrArAmArCmUr | 1087 |
| 1117 | sense strand | ArUrGrArArCrCTA | |
| SNCA- | Modified 25mer | rGmUrGmArGrCrArUrGrArArArCmUrAmUr | 1088 |
| 1119 | sense strand | GrCrArArCrUrATA | |
| SNCA- | Modified 25mer | rUmGrAmGrCrArUrGrArArArCrUmArUmGr | 1089 |
| 1120 | sense strand | CrArCrArUrArUAA | |
| SNCA- | Modified 25mer | rGmArGmCrArUrGrArArArCrUrAmUrGmCr | 1090 |
| 1121 | sense strand | ArCrCrArArUrAAA | |
| SNCA- | Modified 25mer | rAmGrCmArUrGrArArArCrUrArUmGrCmAr | 1091 |
| 1122 | sense strand | CrCrUrArUrArAAT | |
| SNCA- | Modified 25mer | rGmCrAmUrGrArArArCrUrArUrGmCrAmCr | 1092 |
| 1123 | sense strand | CrUrArArArArATA | |
| SNCA- | Modified 25mer | rCmArUmGrArArArCrUrArUrGrCmArCmCr | 1093 |
| 1124 | sense strand | UrArUrArArArUAC | |
| SNCA- | Modified 25mer | rAmUrGmArArArCrUrArUrGrCrAmCrCmUr | 1094 |
| 1125 | sense strand | ArUrArArArUrACT | |
| SNCA- | Modified 25mer | rUmGrAmArArCrUrArUrGrCrArCmCrUmAr | 1095 |
| 1126 | sense strand | UrArArArUrArCTA | |
| SNCA- | Modified 25mer | rGmArAmArCrUrArUrGrCrArCrCmUrAmUr | 1096 |
| 1127 | sense strand | ArArArArArCrUAA | |
| SNCA- | Modified 25mer | rAmArAmCrUrArUrGrCrArCrCrUmArUmAr | 1097 |
| 1128 | sense strand | ArArUrArCrUrAAA | |
| SNCA- | Modified 25mer | rAmArCmUrArUrGrCrArCrCrUrAmUrAmAr | 1098 |
| 1129 | sense strand | ArUrArArUrArAAT | |
| SNCA- | Modified 25mer | rAmCrUmArUrGrCrArCrCrUrArUmArAmAr | 1099 |
| 1130 | sense strand | UrArCrArArArATA | |
| SNCA- | Modified 25mer | rCmUrAmUrGrCrArCrCrUrArUrAmArAmUr | 1100 |
| 1131 | sense strand | ArCrUrArArArUAT | |
| SNCA- | Modified 25mer | rUmArUmGrCrArCrCrUrArUrArAmArUmAr | 1101 |
| 1132 | sense strand | CrUrArArArUrATG | |
| SNCA- | Modified 25mer | rAmUrGmCrArCrCrUrArUrArArAmUrAmCr | 1102 |
| 1133 | sense strand | UrArArArUrArUGA | |
| SNCA- | Modified 25mer | rGmUrUmUrGrUrArUrArUrArArAmUrGmG | 1103 |
| 1194 | sense strand | rUrGrArArArArUTA | |
| SNCA- | Modified 25mer | rUmUrUmGrUrArUrArUrArArArUmGrGmU | 1104 |
| 1195 | sense strand | rGrArGrArArUrUAA | |
| SNCA- | Modified 25mer | rUmUrGmUrArUrArUrArArArUrGmGrUmG | 1105 |
| 1196 | sense strand | rArGrArArUrUrAAA | |
| SNCA- | Modified 25mer | rUmGrUmArUrArUrArArArUrGrGmUrGmA | 1106 |
| 1197 | sense strand | rGrArArArUrArAAA | |
| SNCA- | Modified 25mer | rGmUrAmUrArUrArArArUrGrGrUmGrAmG | 1107 |
| 1198 | sense strand | rArArUrArArArAAT | |
| SNCA- | Modified 25mer | rUmArUmArUrArArArUrGrGrUrGmArGmA | 1108 |
| 1199 | sense strand | rArUrUrArArArATA | |
| SNCA- | Modified 25mer | rAmUrAmUrArArArUrGrGrUrGrAmGrAmA | 1109 |
| 1200 | sense strand | rUrUrArArArArUAA | |
| SNCA- | Modified 25mer | rUmArUmArArArUrGrGrUrGrArGmArAmU | 1110 |
| 1201 | sense strand | rUrArArArArUrAAA | |
| SNCA- | Modified 25mer | rAmUrAmArArUrGrGrUrGrArGrAmArUmU | 1111 |
| 1202 | sense strand | rArArArArUrArAAA | |
| SNCA- | Modified 25mer | rUmArAmArUrGrGrUrGrArGrArAmUrUmA | 1112 |
| 1203 | sense strand | rArArArArArArAAC | |
| SNCA- | Modified 25mer | rAmArAmUrGrGrUrGrArGrArArUmUrAmA | 1113 |
| 1204 | sense strand | rArArUrArArArACG | |
| SNCA- | Modified 25mer | rAmArUmGrGrUrGrArGrArArUrUmArAmA | 1114 |
| 1205 | sense strand | rArUrArArArArCGT | |
| SNCA- | Modified 25mer | rAmUrGmGrUrGrArGrArArUrUrAmArAmA | 1115 |
| 1206 | sense strand | rUrArArArArCrGTT | |
| SNCA- | Modified 25mer | rUmGrGmUrGrArGrArArUrUrArAmArAmU | 1116 |
| 1207 | sense strand | rArArArArCrGrUTA | |
| SNCA- | Modified 25mer | rGmGrUmGrArGrArArUrUrArArAmArUmA | 1117 |
| 1208 | sense strand | rArArArArGrUrUAT | |
| SNCA- | Modified 25mer | rUmUrAmUrUrUrUrUrArUrCrCrCmArUmCr | 1118 |
| 1250 | sense strand | UrCrArArUrUrUAA | |
| SNCA- | Modified 25mer | rAmUrUmUrUrUrArUrCrCrCrArUmCrUmCr | 1119 |
| 1252 | sense strand | ArCrUrArUrArATA | |
| SNCA- | Modified 25mer | rUmUrUmUrUrArUrCrCrCrArUrCmUrCmAr | 1120 |
| 1253 | sense strand | CrUrUrArArArUAA | |
| SNCA- | Modified 25mer | rUmUrUmUrArUrCrCrCrArUrCrUmCrAmCr | 1121 |
| 1254 | sense strand | UrUrUrArArUrAAT | |
| SNCA- | Modified 25mer | rUmUrUmArUrCrCrCrArUrCrUrCmArCmUr | 1122 |
| 1255 | sense strand | UrUrArArUrArATA | |
| SNCA- | Modified 25mer | rUmUrAmUrCrCrCrArUrCrUrCrAmCrUmUr | 1123 |
| 1256 | sense strand | UrArArArArArUAA | |
| SNCA- | Modified 25mer | rUmArUmCrCrCrArUrCrUrCrArCmUrUmUr | 1124 |
| 1257 | sense strand | ArArUrArArUrAAA | |
| SNCA- | Modified 25mer | rAmUrCmCrCrArUrCrUrCrArCrUmUrUmAr | 1125 |
| 1258 | sense strand | ArUrArArUrArAAA | |
| SNCA- | Modified 25mer | rUmCrCmCrArUrCrUrCrArCrUrUmUrAmAr | 1126 |
| 1259 | sense strand | UrArArArArArAAA | |
| SNCA- | Modified 25mer | rCmCrCmArUrCrUrCrArCrUrUrUmArAmUr | 1127 |
| 1260 | sense strand | ArArUrArArArAAT | |
| SNCA- | Modified 25mer | rCmCrAmUrCrUrCrArCrUrUrUrAmArUmAr | 1128 |
| 1261 | sense strand | ArUrArArArArATC | |
| SNCA- | Modified 25mer | rCmArUmCrUrCrArCrUrUrUrArAmUrAmAr | 1129 |
| 1262 | sense strand | UrArArArArArUCA | |
| SNCA- | Modified 25mer | rAmUrCmUrCrArCrUrUrUrArArUmArAmUr | 1130 |
| 1263 | sense strand | ArArArArArUrCAT | |
| SNCA- | Modified 25mer | rUmCrUmCrArCrUrUrUrArArUrAmArUmAr | 1131 |
| 1264 | sense strand | ArArArArUrCrATG | |
| SNCA- | Modified 25mer | rCmUrCmArCrUrUrUrArArUrArAmUrAmAr | 1132 |
| 1265 | sense strand | ArArArArCrArUGC | |
| SNCA- | Modified 25mer | rUmCrAmCrUrUrUrArArUrArArUmArAmAr | 1133 |
| 1266 | sense strand | ArArUrArArUrGCT | |
| SNCA- | Modified 25mer | rCmArCmUrUrUrArArUrArArUrAmArAmAr | 1134 |
| 1267 | sense strand | ArUrCrArUrGrCTT | |
| SNCA- | Modified 25mer | rAmUrUmUrGrArArGrArArGrGrAmGrGmA | 1135 |
| 1351 | sense strand | rArUrUrArUrArGAA | |
| SNCA- | Modified 25mer | rGmArAmUrUrUrUrArGrArArGrAmGrGmU | 1136 |
| 1365 | sense strand | rArGrArArArArAAT | |
| SNCA- | Modified 25mer | rAmGrAmArGrArGrGrUrArGrArGmArAmA | 1137 |
| 1372 | sense strand | rArUrGrArArArCAT | |
| SNCA- | Modified 25mer | rGmArAmGrArGrGrUrArGrArGrAmArAmA | 1138 |
| 1373 | sense strand | rUrGrGrArArCrATT | |
| SNCA- | Modified 25mer | rAmArGmArGrGrUrArGrArGrArAmArAmU | 1139 |
| 1374 | sense strand | rGrGrArArCrArUTA | |
| SNCA- | Modified 25mer | rAmGrAmGrGrUrArGrArGrArArAmArUmG | 1140 |
| 1375 | sense strand | rGrArArArArUrUAA | |
| SNCA- | Modified 25mer | rGmArGmGrUrArGrArGrArArArAmUrGmG | 1141 |
| 1376 | sense strand | rArArCrArUrUrAAC | |
| SNCA- | Modified 25mer | rAmGrGmUrArGrArGrArArArArUmGrGmA | 1142 |
| 1377 | sense strand | rArCrArArUrArACC | |
| SNCA- | Modified 25mer | rGmUrAmGrArGrArArArArUrGrGmArAmCr | 1143 |
| 1379 | sense strand | ArUrUrArArCrCCT | |
| SNCA- | Modified 25mer | rUmArGmArGrArArArArUrGrGrAmArCmAr | 1144 |
| 1380 | sense strand | UrUrArArCrCrCTA | |
| SNCA- | Modified 25mer | rAmGrAmGrArArArArUrGrGrArAmCrAmUr | 1145 |
| 1381 | sense strand | UrArArArCrCrUAC | |
| SNCA- | Modified 25mer | rGmArGmArArArArUrGrGrArArCmArUmUr | 1146 |
| 1382 | sense strand | ArArCrArCrUrACA | |
| SNCA- | Modified 25mer | rAmGrAmArArArUrGrGrArArCrAmUrUmAr | 1147 |
| 1383 | sense strand | ArCrCrArUrArCAC | |
| SNCA- | Modified 25mer | rGmArAmArArUrGrGrArArCrArUmUrAmAr | 1148 |
| 1384 | sense strand | CrCrCrArArCrACT | |
| SNCA- | Modified 25mer | rAmArAmArUrGrGrArArCrArUrUmArAmCr | 1149 |
| 1385 | sense strand | CrCrUrArCrArCTC | |
| SNCA- | Modified 25mer | rAmUrGmGrArArCrArUrUrArArCmCrCmUr | 1150 |
| 1388 | sense strand | ArCrArArUrCrGGA | |
| SNCA- | Modified 25mer | rAmCrUmGrCrCrArGrArArGrUrGmUrGmUr | 1151 |
| 1428 | sense strand | UrUrUrArGrUrATG | |
| SNCA- | Modified 25mer | rCmUrGmCrCrArGrArArGrUrGrUmGrUmUr | 1152 |
| 1429 | sense strand | UrUrGrArUrArUGC | |
| SNCA-259 | Modified 27mer | mUmGmGmCrCrUrUrUrGrAmArAmGrUrCr | 1153 |
| | antisense strand | CrUrUrUrCrArUmGrAmAmUmA | |
| SNCA-260 | Modified 27mer | mUmUmGmGrCrUrUrUrUrGmArAmArGrUr | 1154 |
| | antisense strand | CrCrUrUrUrCrAmUrGmAmAmU | |
| SNCA-261 | Modified 27mer | mCmUmUmGrGrUrCrUrUrUmGrAmArArGr | 1155 |
| | antisense strand | UrCrCrUrUrUrCmArUmGmAmA | |
| SNCA-262 | Modified 27mer | mCmCmUmUrGrUrCrCrUrUmUrGmArArAr | 1156 |
| | antisense strand | GrUrCrCrUrUrUmCrAmUmGmA | |
| SNCA-263 | Modified 27mer | mUmCmCmUrUrUrGrCrCrUmUrUmGrArAr | 1157 |
| | antisense strand | ArGrUrCrCrUrUmUrCmAmUmG | |
| SNCA-264 | Modified 27mer | mCmUmCmCrUrUrGrGrCrCmUrUmUrGrAr | 1158 |
| | antisense strand | ArArGrUrCrCrUmUrUmCmAmU | |
| SNCA-285 | Modified 27mer | mCmUmCmArGrUrArGrCrAmGrCmCrArCr | 1159 |
| | antisense strand | ArArCrUrCrCrCmUrCmCmUmU | |
| SNCA-288 | Modified 27mer | mUmUmUmCrUrUrArGrCrAmGrCmArGrCr | 1160 |
| | antisense strand | CrArCrArArCrUmCrCmCmUmC | |
| SNCA-289 | Modified 27mer | mUmUmUmUrCrUrCrArGrCmArGmCrArGr | 1161 |
| | antisense strand | CrCrArCrArArCmUrCmCmCmU | |
| SNCA-290 | Modified 27mer | mGmUmUmUrUrUrUrCrArGmCrAmGrCrAr | 1162 |
| | antisense strand | GrCrCrArCrArAmCrUmCmCmC | |
| SNCA-292 | Modified 27mer | mUmGmGmUrUrUrUrCrUrCmArGmCrArGr | 1163 |
| | antisense strand | CrArGrCrCrArCmArAmCmUmC | |
| SNCA-293 | Modified 27mer | mUmUmGmGrUrUrUrUrCrUmCrAmGrCrAr | 1164 |
| | antisense strand | GrCrArGrCrCrAmCrAmAmCmU | |
| SNCA-294 | Modified 27mer | mUmUmUmGrGrUrUrUrUrCmUrCmArGrCr | 1165 |
| | antisense strand | ArGrCrArGrCrCmArCmAmAmC | |
| SNCA-295 | Modified 27mer | mGmUmUmUrGrUrUrUrUrUmCrUmCrArGr | 1166 |
| | antisense strand | CrArGrCrArGrCmCrAmCmAmA | |
| SNCA-296 | Modified 27mer | mUmGmUmUrUrUrGrUrUrUmUrCmUrCrAr | 1167 |
| | antisense strand | GrCrArGrCrArGmCrCmAmCmA | |
| SNCA-297 | Modified 27mer | mCmUmGmUrUrUrGrGrUrUmUrUmCrUrCr | 1168 |
| | antisense strand | ArGrCrArGrCrAmGrCmCmAmC | |
| SNCA-407 | Modified 27mer | mUmCmUmUrUrUrGrUrCrUmUrCmUrCrAr | 1169 |
| | antisense strand | GrCrCrArCrUrGmUrUmGmCmC | |
| SNCA-408 | Modified 27mer | mCmUmCmUrUrUrGrGrUrCmUrUmCrUrCr | 1170 |
| | antisense strand | ArGrCrCrArCrUmGrUmUmGmC | |
| SNCA-409 | Modified 27mer | mGmCmUmCrUrUrUrGrGrUmCrUmUrCrUr | 1171 |
| | antisense strand | CrArGrCrCrArCmUrGmUmUmG | |
| SNCA-410 | Modified 27mer | mUmGmCmUrCrUrUrUrGrGmUrCmUrUrCr | 1172 |
| | antisense strand | UrCrArGrCrCrAmCrUmGmUmU | |
| SNCA-411 | Modified 27mer | mUmUmGmCrUrUrUrUrUrGmGrUmCrUrUr | 1173 |
| | antisense strand | CrUrCrArGrCrCmArCmUmGmU | |
| SNCA-412 | Modified 27mer | mCmUmUmGrCrUrCrUrUrUmGrGmUrCrUr | 1174 |
| | antisense strand | UrCrUrCrArGrCmCrAmCmUmG | |
| SNCA-413 | Modified 27mer | mAmCmUmUrGrUrUrCrUrUmUrGmGrUrCr | 1175 |
| | antisense strand | UrUrCrUrCrArGmCrCmAmCmU | |
| SNCA-414 | Modified 27mer | mCmAmCmUrUrUrCrUrCrUmUrUmGrGrUr | 1176 |
| | antisense strand | CrUrUrCrUrCrAmGrCmCmAmC | |
| SNCA-415 | Modified 27mer | mUmCmAmCrUrUrGrCrUrCmUrUmUrGrGr | 1177 |
| | antisense strand | UrCrUrUrCrUrCmArGmCmCmA | |
| SNCA-416 | Modified 27mer | mGmUmCmArCrUrUrGrCrUmCrUmUrUrGr | 1178 |
| | antisense strand | GrUrCrUrUrCrUmCrAmGmCmC | |
| SNCA-417 | Modified 27mer | mUmGmUmCrArUrUrUrGrCmUrCmUrUrUr | 1179 |
| | antisense strand | GrGrUrCrUrUrCmUrCmAmGmC | |
| SNCA-418 | Modified 27mer | mUmUmGmUrCrUrCrUrUrGmCrUmCrUrUr | 1180 |
| | antisense strand | UrGrGrUrCrUrUmCrUmCmAmG | |
| SNCA-419 | Modified 27mer | mUmUmUmGrUrUrArCrUrUmGrCmUrCrUr | 1181 |
| | antisense strand | UrUrGrGrUrCrUmUrCmUmCmA | |
| SNCA-420 | Modified 27mer | mAmUmUmUrGrUrCrArCrUmUrGmCrUrCr | 1182 |
| | antisense strand | UrUrUrGrGrUrCmUrUmCmUmC | |
| SNCA-421 | Modified 27mer | mCmAmUmUrUrUrUrCrArCmUrUmGrCrUr | 1183 |
| | antisense strand | CrUrUrUrGrGrUmCrUmUmCmU | |
| SNCA-422 | Modified 27mer | mAmCmAmUrUrUrGrUrCrAmCrUmUrGrCr | 1184 |
| | antisense strand | UrCrUrUrUrGrGmUrCmUmUmC | |
| SNCA-423 | Modified 27mer | mAmAmCmArUrUrUrGrUrCmArCmUrUrGr | 1185 |
| | antisense strand | CrUrCrUrUrUrGmGrUmCmUmU | |
| SNCA-424 | Modified 27mer | mCmAmAmCrArUrUrUrGrUmCrAmCrUrUr | 1186 |
| | antisense strand | GrCrUrCrUrUrUmGrGmUmCmU | |
| SNCA-425 | Modified 27mer | mCmCmAmArCrUrUrUrUrGmUrCmArCrUr | 1187 |
| | antisense strand | UrGrCrUrCrUrUmUrGmGmUmC | |
| SNCA-426 | Modified 27mer | mUmCmCmArArUrArUrUrUmGrUmCrArCr | 1188 |
| | antisense strand | UrUrGrCrUrCrUmUrUmGmGmU | |
| SNCA-427 | Modified 27mer | mCmUmCmCrArUrCrArUrUmUrGmUrCrAr | 1189 |
| | antisense strand | CrUrUrGrCrUrCmUrUmUmGmG | |
| SNCA-428 | Modified 27mer | mCmCmUmCrCrUrArCrArUmUrUmGrUrCr | 1190 |
| | antisense strand | ArCrUrUrGrCrUmCrUmUmUmG | |
| SNCA-429 | Modified 27mer | mUmCmCmUrCrUrArArCrAmUrUmUrGrUr | 1191 |
| | antisense strand | CrArCrUrUrGrCmUrCmUmUmU | |
| SNCA-430 | Modified 27mer | mCmUmCmCrUrUrCrArArCmArUmUrUrGr | 1192 |
| | antisense strand | UrCrArCrUrUrGmCrUmCmUmU | |
| SNCA-431 | Modified 27mer | mGmCmUmCrCrUrCrCrArAmCrAmUrUrUr | 1193 |
| | antisense strand | GrUrCrArCrUrUmGrCmUmCmU | |
| SNCA-432 | Modified 27mer | mUmGmCmUrCrUrUrCrCrAmArCmArUrUr | 1194 |
| | antisense strand | UrGrUrCrArCrUmUrGmCmUmC | |
| SNCA-433 | Modified 27mer | mCmUmGmCrUrUrCrUrCrCmArAmCrArUr | 1195 |
| | antisense strand | UrUrGrUrCrArCmUrUmGmCmU | |
| SNCA-434 | Modified 27mer | mAmCmUmGrCrUrCrCrUrCmCrAmArCrAr | 1196 |
| | antisense strand | UrUrUrGrUrCrAmCrUmUmGmC | |
| SNCA-435 | Modified 27mer | mCmAmCmUrGrUrUrCrCrUmCrCmArArCr | 1197 |
| | antisense strand | ArUrUrUrGrUrCmArCmUmUmG | |
| SNCA-436 | Modified 27mer | mCmCmAmCrUrUrCrUrCrCmUrCmCrArAr | 1198 |
| | antisense strand | CrArUrUrUrGrUmCrAmCmUmU | |
| SNCA-437 | Modified 27mer | mAmCmCmArCrUrGrCrUrCmCrUmCrCrAr | 1199 |
| | antisense strand | ArCrArUrUrUrGmUrCmAmCmU | |
| SNCA-725 | Modified 27mer | mGmCmAmCrArUrUrGrGrAmArCmUrGrAr | 1200 |
| | antisense strand | GrCrArCrUrUrGmUrAmCmAmG | |
| SNCA-726 | Modified 27mer | mGmGmCmArCrUrUrUrGrGmArAmCrUrGr | 1201 |
| | antisense strand | ArGrCrArCrUrUmGrUmAmCmA | |
| SNCA-727 | Modified 27mer | mGmGmGmCrArUrArUrUrGmGrAmArCrUr | 1202 |
| | antisense strand | GrArGrCrArCrUmUrGmUmAmC | |
| SNCA-728 | Modified 27mer | mUmGmGmGrCrUrCrArUrUmGrGmArArCr | 1203 |
| | antisense strand | UrGrArGrCrArCmUrUmGmUmA | |
| SNCA-729 | Modified 27mer | mCmUmGmGrGrUrArCrArUmUrGmGrArAr | 1204 |
| | antisense strand | CrUrGrArGrCrAmCrUmUmGmU | |
| SNCA-730 | Modified 27mer | mAmCmUmGrGrUrCrArCrAmUrUmGrGrAr | 1205 |
| | antisense strand | ArCrUrGrArGrCmArCmUmUmG | |
| SNCA-731 | Modified 27mer | mGmAmCmUrGrUrGrCrArCmArUmUrGrGr | 1206 |
| | antisense strand | ArArCrUrGrArGmCrAmCmUmU | |
| SNCA-732 | Modified 27mer | mUmGmAmCrUrUrGrGrCrAmCrAmUrUrGr | 1207 |
| | antisense strand | GrArArCrUrGrAmGrCmAmCmU | |
| SNCA-733 | Modified 27mer | mAmUmGmArCrUrGrGrGrCmArCmArUrUr | 1208 |
| | antisense strand | GrGrArArCrUrGmArGmCmAmC | |
| SNCA-734 | Modified 27mer | mCmAmUmGrArUrUrGrGrGmCrAmCrArUr | 1209 |
| | antisense strand | UrGrGrArArCrUmGrAmGmCmA | |
| SNCA-735 | Modified 27mer | mUmCmAmUrGrUrCrUrGrGmGrCmArCrAr | 1210 |
| | antisense strand | UrUrGrGrArArCmUrGmAmGmC | |
| SNCA-736 | Modified 27mer | mGmUmCmArUrUrArCrUrGmGrGmCrArCr | 1211 |
| | antisense strand | ArUrUrGrGrArAmCrUmGmAmG | |
| SNCA-737 | Modified 27mer | mUmGmUmCrArUrGrArCrUmGrGmGrCrAr | 1212 |
| | antisense strand | CrArUrUrGrGrAmArCmUmGmA | |
| SNCA-738 | Modified 27mer | mAmUmGmUrCrUrUrGrArCmUrGmGrGrCr | 1213 |
| | antisense strand | ArCrArUrUrGrGmArAmCmUmG | |
| SNCA-739 | Modified 27mer | mAmAmUmGrUrUrArUrGrAmCrUmGrGrGr | 1214 |
| | antisense strand | CrArCrArUrUrGmGrAmAmCmU | |
| SNCA-740 | Modified 27mer | mAmAmAmUrGrUrCrArUrGmArCmUrGrGr | 1215 |
| | antisense strand | GrCrArCrArUrUmGrGmAmAmC | |
| SNCA-741 | Modified 27mer | mGmAmAmArUrUrUrCrArUmGrAmCrUrGr | 1216 |
| | antisense strand | GrGrCrArCrArUmUrGmGmAmA | |
| SNCA-742 | Modified 27mer | mAmGmAmArArUrGrUrCrAmUrGmArCrUr | 1217 |
| | antisense strand | GrGrGrCrArCrAmUrUmGmGmA | |
| SNCA-790 | Modified 27mer | mUmUmCmArArUrCrArCrUmGrCmUrGrAr | 1218 |
| | antisense strand | UrGrGrArArGrAmCrUmUmCmG | |
| SNCA-791 | Modified 27mer | mCmUmUmCrArUrUrCrArCmUrGmCrUrGr | 1219 |
| | antisense strand | ArUrGrGrArArGmArCmUmUmC | |
| SNCA-792 | Modified 27mer | mAmCmUmUrCrUrArUrCrAmCrUmGrCrUr | 1220 |
| | antisense strand | GrArUrGrGrArAmGrAmCmUmU | |
| SNCA-938 | Modified 27mer | mUmAmAmGrUrUrGrUrArGmUrCmArCrUr | 1221 |
| | antisense strand | UrArGrGrUrGrUmUrUmUmUmA | |
| SNCA-939 | Modified 27mer | mAmUmAmArGrUrGrGrUrAmGrUmCrArCr | 1222 |
| | antisense strand | UrUrArGrGrUrGmUrUmUmUmU | |
| SNCA-940 | Modified 27mer | mAmAmUmArArUrUrGrGrUmArGmUrCrAr | 1223 |
| | antisense strand | CrUrUrArGrGrUmGrUmUmUmU | |
| SNCA-941 | Modified 27mer | mAmAmAmUrArUrGrUrGrGmUrAmGrUrCr | 1224 |
| | antisense strand | ArCrUrUrArGrGmUrGmUmUmU | |
| SNCA-942 | Modified 27mer | mGmAmAmArUrUrArGrUrGmGrUmArGrUr | 1225 |
| | antisense strand | CrArCrUrUrArGmGrUmGmUmU | |
| SNCA-943 | Modified 27mer | mAmGmAmArArUrArArGrUmGrGmUrArGr | 1226 |
| | antisense strand | UrCrArCrUrUrAmGrGmUmGmU | |
| SNCA-944 | Modified 27mer | mUmAmGmArArUrUrArArGmUrGmGrUrAr | 1227 |
| | antisense strand | GrUrCrArCrUrUmArGmGmUmG | |
| SNCA-945 | Modified 27mer | mUmUmAmGrArUrArUrArAmGrUmGrGrUr | 1228 |
| | antisense strand | ArGrUrCrArCrUmUrAmGmGmU | |
| SNCA-946 | Modified 27mer | mUmUmUmArGrUrArArUrAmArGmUrGrGr | 1229 |
| | antisense strand | UrArGrUrCrArCmUrUmAmGmG | |
| SNCA-947 | Modified 27mer | mAmUmUmUrArUrArArArUmArAmGrUrGr | 1230 |
| | antisense strand | GrUrArGrUrCrAmCrUmUmAmG | |
| SNCA-948 | Modified 27mer | mGmAmUmUrUrUrGrArArAmUrAmArGrUr | 1231 |
| | antisense strand | GrGrUrArGrUrCmArCmUmUmA | |
| SNCA-949 | Modified 27mer | mGmGmAmUrUrUrArGrArAmArUmArArGr | 1232 |
| | antisense strand | UrGrGrUrArGrUmCrAmCmUmU | |
| SNCA-950 | Modified 27mer | mAmGmGmArUrUrUrArGrAmArAmUrArAr | 1233 |
| | antisense strand | GrUrGrGrUrArGmUrCmAmCmU | |
| SNCA-951 | Modified 27mer | mGmAmGmGrArUrUrUrArGmArAmArUrAr | 1234 |
| | antisense strand | ArGrUrGrGrUrAmGrUmCmAmC | |
| SNCA-952 | Modified 27mer | mUmGmAmGrGrUrUrUrUrAmGrAmArArUr | 1235 |
| | antisense strand | ArArGrUrGrGrUmArGmUmCmA | |
| SNCA-953 | Modified 27mer | mGmUmGmArGrUrArUrUrUmArGmArArAr | 1236 |
| | antisense strand | UrArArGrUrGrGmUrAmGmUmC | |
| SNCA-954 | Modified 27mer | mAmGmUmGrArUrGrArUrUmUrAmGrArAr | 1237 |
| | antisense strand | ArUrArArGrUrGmGrUmAmGmU | |
| SNCA- | Modified 27mer | mUmUmAmUrArUrArUrArUmUrAmArCrAr | 1238 |
| 1081 | antisense strand | ArArUrUrUrCrAmCrAmAmUmA | |
| SNCA- | Modified 27mer | mAmUmUmArUrUrUrArUrAmUrUmArArCr | 1239 |
| 1082 | antisense strand | ArArArUrUrUrCmArCmAmAmU | |
| SNCA- | Modified 27mer | mUmAmUmUrArUrArUrArUmArUmUrArAr | 1240 |
| 1083 | antisense strand | CrArArArUrUrUmCrAmCmAmA | |
| SNCA- | Modified 27mer | mGmUmAmUrUrUrUrArUrAmUrAmUrUrAr | 1241 |
| 1084 | antisense strand | ArCrArArArUrUmUrCmAmCmA | |
| SNCA- | Modified 27mer | mAmGmUmArUrUrArUrArUmArUmArUrUr | 1242 |
| 1085 | antisense strand | ArArCrArArArUmUrUmCmAmC | |
| SNCA- | Modified 27mer | mUmCmAmCrCrUrUrUrUrAmUrAmUrArCr | 1243 |
| 1188 | antisense strand | ArArArCrArCrAmArGmUmGmA | |
| SNCA- | Modified 27mer | mCmUmCmArCrUrArUrUrUmArUmArUrAr | 1244 |
| 1189 | antisense strand | CrArArArCrArCmArAmGmUmG | |
| SNCA- | Modified 27mer | mUmCmUmCrArUrCrArUrUmUrAmUrArUr | 1245 |
| 1190 | antisense strand | ArCrArArArCrAmCrAmAmGmU | |
| SNCA- | Modified 27mer | mUmUmCmUrCrUrCrCrArUmUrUmArUrAr | 1246 |
| 1191 | antisense strand | UrArCrArArArCmArCmAmAmG | |
| SNCA- | Modified 27mer | mAmUmUmCrUrUrArCrCrAmUrUmUrArUr | 1247 |
| 1192 | antisense strand | ArUrArCrArArAmCrAmCmAmA | |
| SNCA- | Modified 27mer | mAmAmUmUrCrUrCrArCrCmArUmUrUrAr | 1248 |
| 1193 | antisense strand | UrArUrArCrArAmArCmAmCmA | |
| SNCA-225 | Modified 27mer | mGmGmCmUrArUrUrGrArAmUrUmCrCrUr | 1249 |
| | antisense strand | UrUrArCrArCrCmArCmAmCmU | |
| SNCA-226 | Modified 27mer | mUmGmGmCrUrUrArUrGrAmArUmUrCrCr | 1250 |
| | antisense strand | UrUrUrArCrArCmCrAmCmAmC | |
| SNCA-227 | Modified 27mer | mAmUmGmGrCrUrArArUrGmArAmUrUrCr | 1251 |
| | antisense strand | CrUrUrUrArCrAmCrCmAmCmA | |
| SNCA-228 | Modified 27mer | mCmAmUmGrGrUrUrArArUmGrAmArUrUr | 1252 |
| | antisense strand | CrCrUrUrUrArCmArCmCmAmC | |
| SNCA-229 | Modified 27mer | mCmCmAmUrGrUrCrUrArAmUrGmArArUr | 1253 |
| | antisense strand | UrCrCrUrUrUrAmCrAmCmCmA | |
| SNCA-230 | Modified 27mer | mUmCmCmArUrUrGrCrUrAmArUmGrArAr | 1254 |
| | antisense strand | UrUrCrCrUrUrUmArCmAmCmC | |
| SNCA-231 | Modified 27mer | mAmUmCmCrArUrGrGrCrUmArAmUrGrAr | 1255 |
| | antisense strand | ArUrUrCrCrUrUmUrAmCmAmC | |
| SNCA-232 | Modified 27mer | mCmAmUmCrCrUrUrGrGrCmUrAmArUrGr | 1256 |
| | antisense strand | ArArUrUrCrCrUmUrUmAmCmA | |
| SNCA-233 | Modified 27mer | mAmCmAmUrCrUrArUrGrGmCrUmArArUr | 1257 |
| | antisense strand | GrArArUrUrCrCmUrUmUmAmC | |
| SNCA-234 | Modified 27mer | mUmAmCmArUrUrCrArUrGmGrCmUrArAr | 1258 |
| | antisense strand | UrGrArArUrUrCmCrUmUmUmA | |
| SNCA-235 | Modified 27mer | mAmUmAmCrArUrCrCrArUmGrGmCrUrAr | 1259 |
| | antisense strand | ArUrGrArArUrUmCrCmUmUmU | |
| SNCA-236 | Modified 27mer | mAmAmUmArCrUrUrCrCrAmUrGmGrCrUr | 1260 |
| | antisense strand | ArArUrGrArArUmUrCmCmUmU | |
| SNCA-237 | Modified 27mer | mGmAmAmUrArUrArUrCrCmArUmGrGrCr | 1261 |
| | antisense strand | UrArArUrGrArAmUrUmCmCmU | |
| SNCA-238 | Modified 27mer | mUmGmAmArUrUrCrArUrCmCrAmUrGrGr | 1262 |
| | antisense strand | CrUrArArUrGrAmArUmUmCmC | |
| SNCA-239 | Modified 27mer | mAmUmGmArArUrArCrArUmCrCmArUrGr | 1263 |
| | antisense strand | GrCrUrArArUrGmArAmUmUmC | |
| SNCA-240 | Modified 27mer | mCmAmUmGrArUrUrArCrAmUrCmCrArUr | 1264 |
| | antisense strand | GrGrCrUrArArUmGrAmAmUmU | |
| SNCA-241 | Modified 27mer | mUmCmAmUrGrUrArUrArCmArUmCrCrAr | 1265 |
| | antisense strand | UrGrGrCrUrArAmUrGmAmAmU | |
| SNCA-242 | Modified 27mer | mUmUmCmArUrUrArArUrAmCrAmUrCrCr | 1266 |
| | antisense strand | ArUrGrGrCrUrAmArUmGmAmA | |
| SNCA-243 | Modified 27mer | mUmUmUmCrArUrGrArArUmArCmArUrCr | 1267 |
| | antisense strand | CrArUrGrGrCrUmArAmUmGmA | |
| SNCA-244 | Modified 27mer | mCmUmUmUrCrUrUrGrArAmUrAmCrArUr | 1268 |
| | antisense strand | CrCrArUrGrGrCmUrAmAmUmG | |
| SNCA-245 | Modified 27mer | mCmCmUmUrUrUrArUrGrAmArUmArCrAr | 1269 |
| | antisense strand | UrCrCrArUrGrGmCrUmAmAmU | |
| SNCA-246 | Modified 27mer | mUmCmCmUrUrUrCrArUrGmArAmUrArCr | 1270 |
| | antisense strand | ArUrCrCrArUrGmGrCmUmAmA | |
| SNCA-247 | Modified 27mer | mGmUmCmCrUrUrUrCrArUmGrAmArUrAr | 1271 |
| | antisense strand | CrArUrCrCrArUmGrGmCmUmA | |
| SNCA-248 | Modified 27mer | mAmGmUmCrCrUrUrUrCrAmUrGmArArUr | 1272 |
| | antisense strand | ArCrArUrCrCrAmUrGmGmCmU | |
| SNCA-249 | Modified 27mer | mAmAmGmUrCrUrUrUrUrCmArUmGrArAr | 1273 |
| | antisense strand | UrArCrArUrCrCmArUmGmGmC | |
| SNCA-250 | Modified 27mer | mAmAmAmGrUrUrCrUrUrUmCrAmUrGrAr | 1274 |
| | antisense strand | ArUrArCrArUrCmCrAmUmGmG | |
| SNCA-251 | Modified 27mer | mGmAmAmArGrUrCrCrUrUmUrCmArUrGr | 1275 |
| | antisense strand | ArArUrArCrArUmCrCmAmUmG | |
| SNCA-252 | Modified 27mer | mUmGmAmArArUrUrCrCrUmUrUmCrArUr | 1276 |
| | antisense strand | GrArArUrArCrAmUrCmCmAmU | |
| SNCA-253 | Modified 27mer | mUmUmGmArArUrGrUrCrCmUrUmUrCrAr | 1277 |
| | antisense strand | UrGrArArUrArCmArUmCmCmA | |
| SNCA-254 | Modified 27mer | mUmUmUmGrArUrArGrUrCmCrUmUrUrCr | 1278 |
| | antisense strand | ArUrGrArArUrAmCrAmUmCmC | |
| SNCA-256 | Modified 27mer | mCmCmUmUrUrUrArArArGmUrCmCrUrUr | 1279 |
| | antisense strand | UrCrArUrGrArAmUrAmCmAmU | |
| SNCA-330 | Modified 27mer | mCmUmCmUrUrUrUrGrUrCmUrUmUrCrCr | 1280 |
| | antisense strand | UrGrCrUrGrCrUmUrCmUmGmC | |
| SNCA-335 | Modified 27mer | mAmCmAmCrCrUrUrCrUrUmUrUmGrUrCr | 1281 |
| | antisense strand | UrUrUrCrCrUrGmCrUmGmCmU | |
| SNCA-337 | Modified 27mer | mGmAmAmCrArUrCrCrUrCmUrUmUrUrGr | 1282 |
| | antisense strand | UrCrUrUrUrCrCmUrGmCmUmG | |
| SNCA-341 | Modified 27mer | mUmAmGmArGrUrArCrArCmCrCmUrCrUr | 1283 |
| | antisense strand | UrUrUrGrUrCrUmUrUmCmCmU | |
| SNCA-342 | Modified 27mer | mAmUmAmGrArUrArArCrAmCrCmCrUrCr | 1284 |
| | antisense strand | UrUrUrUrGrUrCmUrUmUmCmC | |
| SNCA-344 | Modified 27mer | mAmCmAmUrArUrArGrArAmCrAmCrCrCr | 1285 |
| | antisense strand | UrCrUrUrUrUrGmUrCmUmUmU | |
| SNCA-345 | Modified 27mer | mUmAmCmArUrUrGrArGrAmArCmArCrCr | 1286 |
| | antisense strand | CrUrCrUrUrUrUmGrUmCmUmU | |
| SNCA-351 | Modified 27mer | mGmGmAmGrCrUrUrArCrAmUrAmGrArGr | 1287 |
| | antisense strand | ArArCrArCrCrCmUrCmUmUmU | |
| SNCA-353 | Modified 27mer | mUmUmGmGrArUrCrCrUrAmCrAmUrArGr | 1288 |
| | antisense strand | ArGrArArCrArCmCrCmUmCmU | |
| SNCA-355 | Modified 27mer | mUmUmUmUrGrUrArGrCrCmUrAmCrArUr | 1289 |
| | antisense strand | ArGrArGrArArCmArCmCmCmU | |
| SNCA-638 | Modified 27mer | mGmGmUmUrCrUrUrArGrUmCrUmUrGrAr | 1290 |
| | antisense strand | UrArCrCrCrUrUmCrCmUmCmA | |
| SNCA-641 | Modified 27mer | mUmCmAmGrGrUrUrCrGrUmArGmUrCrUr | 1291 |
| | antisense strand | UrGrArUrArCrCmCrUmUmCmC | |
| SNCA-642 | Modified 27mer | mUmUmCmArGrUrUrUrCrGmUrAmGrUrCr | 1292 |
| | antisense strand | UrUrGrArUrArCmCrCmUmUmC | |
| SNCA-647 | Modified 27mer | mUmAmGmGrCrUrUrCrArGmGrUmUrCrGr | 1293 |
| | antisense strand | UrArGrUrCrUrUmGrAmUmAmC | |
| SNCA-648 | Modified 27mer | mUmUmAmGrGrUrUrUrCrAmGrGmUrUrCr | 1294 |
| | antisense strand | GrUrArGrUrCrUmUrGmAmUmA | |
| SNCA-650 | Modified 27mer | mUmCmUmUrArUrGrCrUrUmCrAmGrGrUr | 1295 |
| | antisense strand | UrCrGrUrArGrUmCrUmUmGmA | |
| SNCA-652 | Modified 27mer | mUmUmUmCrUrUrArGrGrCmUrUmCrArGr | 1296 |
| | antisense strand | GrUrUrCrGrUrAmGrUmCmUmU | |
| SNCA-653 | Modified 27mer | mAmUmUmUrCrUrUrArGrGmCrUmUrCrAr | 1297 |
| | antisense strand | GrGrUrUrCrGrUmArGmUmCmU | |
| SNCA-654 | Modified 27mer | mUmAmUmUrUrUrUrUrArGmGrCmUrUrCr | 1298 |
| | antisense strand | ArGrGrUrUrCrGmUrAmGmUmC | |
| SNCA-656 | Modified 27mer | mGmAmUmArUrUrUrCrUrUmArGmGrCrUr | 1299 |
| | antisense strand | UrCrArGrGrUrUmCrGmUmAmG | |
| SNCA-657 | Modified 27mer | mAmGmAmUrArUrUrUrCrUmUrAmGrGrCr | 1300 |
| | antisense strand | UrUrCrArGrGrUmUrCmGmUmA | |
| SNCA-659 | Modified 27mer | mAmAmAmGrArUrArUrUrUmCrUmUrArGr | 1301 |
| | antisense strand | GrCrUrUrCrArGmGrUmUmCmG | |
| SNCA-660 | Modified 27mer | mCmAmAmArGrUrUrArUrUmUrCmUrUrAr | 1302 |
| | antisense strand | GrGrCrUrUrCrAmGrGmUmUmC | |
| SNCA-661 | Modified 27mer | mGmCmAmArArUrArUrArUmUrUmCrUrUr | 1303 |
| | antisense strand | ArGrGrCrUrUrCmArGmGmUmU | |
| SNCA-662 | Modified 27mer | mAmGmCmArArUrGrArUrAmUrUmUrCrUr | 1304 |
| | antisense strand | UrArGrGrCrUrUmCrAmGmGmU | |
| SNCA-663 | Modified 27mer | mGmAmGmCrArUrArGrArUmArUmUrUrCr | 1305 |
| | antisense strand | UrUrArGrGrCrUmUrCmAmGmG | |
| SNCA-668 | Modified 27mer | mAmCmUmGrGrUrArGrCrAmArAmGrArUr | 1306 |
| | antisense strand | ArUrUrUrCrUrUmArGmGmCmU | |
| SNCA-669 | Modified 27mer | mAmAmCmUrGrUrGrArGrCmArAmArGrAr | 1307 |
| | antisense strand | UrArUrUrUrCrUmUrAmGmGmC | |
| SNCA-672 | Modified 27mer | mAmGmAmArArUrUrGrGrGmArGmCrArAr | 1308 |
| | antisense strand | ArGrArUrArUrUmUrCmUmUmA | |
| SNCA-675 | Modified 27mer | mUmCmAmArGrUrArArCrUmGrGmGrArGr | 1309 |
| | antisense strand | CrArArArGrArUmArUmUmUmC | |
| SNCA-676 | Modified 27mer | mCmUmCmArArUrArArArCmUrGmGrGrAr | 1310 |
| | antisense strand | GrCrArArArGrAmUrAmUmUmU | |
| SNCA-689 | Modified 27mer | mUmCmUmGrUrUrArGrCrAmGrAmUrCrUr | 1311 |
| | antisense strand | CrArArGrArArAmCrUmGmGmG | |
| SNCA-724 | Modified 27mer | mCmAmCmArUrUrGrGrArAmCrUmGrArGr | 1312 |
| | antisense strand | CrArCrUrUrGrUmArCmAmGmG | |
| SNCA-744 | Modified 27mer | mUmGmAmGrArUrArUrGrUmCrAmUrGrAr | 1313 |
| | antisense strand | CrUrGrGrGrCrAmCrAmUmUmG | |
| SNCA-745 | Modified 27mer | mUmUmGmArGrUrArArUrGmUrCmArUrGr | 1314 |
| | antisense strand | ArCrUrGrGrGrCmArCmAmUmU | |
| SNCA-746 | Modified 27mer | mUmUmUmGrArUrArArArUmGrUmCrArUr | 1315 |
| | antisense strand | GrArCrUrGrGrGmCrAmCmAmU | |
| SNCA-751 | Modified 27mer | mAmAmAmArCrUrUrUrGrAmGrAmArArUr | 1316 |
| | antisense strand | GrUrCrArUrGrAmCrUmGmGmG | |
| SNCA-752 | Modified 27mer | mAmAmAmArArUrUrUrUrGmArGmArArAr | 1317 |
| | antisense strand | UrGrUrCrArUrGmArCmUmGmG | |
| SNCA-753 | Modified 27mer | mUmAmAmArArUrCrUrUrUmGrAmGrArAr | 1318 |
| | antisense strand | ArUrGrUrCrArUmGrAmCmUmG | |
| SNCA-754 | Modified 27mer | mGmUmAmArArUrArCrUrUmUrGmArGrAr | 1319 |
| | antisense strand | ArArUrGrUrCrAmUrGmAmCmU | |
| SNCA-755 | Modified 27mer | mUmGmUmArArUrArArCrUmUrUmGrArGr | 1320 |
| | antisense strand | ArArArUrGrUrCmArUmGmAmC | |
| SNCA-756 | Modified 27mer | mCmUmGmUrArUrArArArCmUrUmUrGrAr | 1321 |
| | antisense strand | GrArArArUrGrUmCrAmUmGmA | |
| SNCA-757 | Modified 27mer | mAmCmUmGrUrUrArArArAmCrUmUrUrGr | 1322 |
| | antisense strand | ArGrArArArUrGmUrCmAmUmG | |
| SNCA-758 | Modified 27mer | mCmAmCmUrGrUrArArArAmArCmUrUrUr | 1323 |
| | antisense strand | GrArGrArArArUmGrUmCmAmU | |
| SNCA-759 | Modified 27mer | mAmCmAmCrUrUrUrArArAmArAmCrUrUr | 1324 |
| | antisense strand | UrGrArGrArArAmUrGmUmCmA | |
| SNCA-760 | Modified 27mer | mUmAmCmArCrUrGrUrArAmArAmArCrUr | 1325 |
| | antisense strand | UrUrGrArGrArAmArUmGmUmC | |
| SNCA-761 | Modified 27mer | mAmUmAmCrArUrUrGrUrAmArAmArArCr | 1326 |
| | antisense strand | UrUrUrGrArGrAmArAmUmGmU | |
| SNCA-762 | Modified 27mer | mGmAmUmArCrUrCrUrGrUmArAmArArAr | 1327 |
| | antisense strand | CrUrUrUrGrArGmArAmAmUmG | |
| SNCA-789 | Modified 27mer | mUmCmAmArUrUrArCrUrGmCrUmGrArUr | 1328 |
| | antisense strand | GrGrArArGrArCmUrUmCmGmA | |
| SNCA-795 | Modified 27mer | mGmAmUmArCrUrUrCrArAmUrCmArCrUr | 1329 |
| | antisense strand | GrCrUrGrArUrGmGrAmAmGmA | |
| SNCA-796 | Modified 27mer | mAmGmAmUrArUrUrUrCrAmArUmCrArCr | 1330 |
| | antisense strand | UrGrCrUrGrArUmGrGmAmAmG | |
| SNCA-797 | Modified 27mer | mCmAmGmArUrUrCrUrUrCmArAmUrCrAr | 1331 |
| | antisense strand | CrUrGrCrUrGrAmUrGmGmAmA | |
| SNCA-798 | Modified 27mer | mAmCmAmGrArUrArCrUrUmCrAmArUrCr | 1332 |
| | antisense strand | ArCrUrGrCrUrGmArUmGmGmA | |
| SNCA-799 | Modified 27mer | mUmAmCmArGrUrUrArCrUmUrCmArArUr | 1333 |
| | antisense strand | CrArCrUrGrCrUmGrAmUmGmG | |
| SNCA-800 | Modified 27mer | mGmUmAmCrArUrArUrArCmUrUmCrArAr | 1334 |
| | antisense strand | UrCrArCrUrGrCmUrGmAmUmG | |
| SNCA-801 | Modified 27mer | mGmGmUmArCrUrGrArUrAmCrUmUrCrAr | 1335 |
| | antisense strand | ArUrCrArCrUrGmCrUmGmAmU | |
| SNCA-802 | Modified 27mer | mAmGmGmUrArUrArGrArUmArCmUrUrCr | 1336 |
| | antisense strand | ArArUrCrArCrUmGrCmUmGmA | |
| SNCA-803 | Modified 27mer | mCmAmGmGrUrUrCrArGrAmUrAmCrUrUr | 1337 |
| | antisense strand | CrArArUrCrArCmUrGmCmUmG | |
| SNCA-804 | Modified 27mer | mGmCmAmGrGrUrArCrArGmArUmArCrUr | 1338 |
| | antisense strand | UrCrArArUrCrAmCrUmGmCmU | |
| SNCA-805 | Modified 27mer | mGmGmCmArGrUrUrArCrAmGrAmUrArCr | 1339 |
| | antisense strand | UrUrCrArArUrCmArCmUmGmC | |
| SNCA-809 | Modified 27mer | mUmGmGmGrGrUrCrArGrGmUrAmCrArGr | 1340 |
| | antisense strand | ArUrArCrUrUrCmArAmUmCmA | |
| SNCA-839 | Modified 27mer | mUmCmAmGrUrUrArArArGmGrGmArArGr | 1341 |
| | antisense strand | CrArCrCrGrArAmArUmGmCmU | |
| SNCA-844 | Modified 27mer | mUmCmAmCrUrUrCrArGrUmGrAmArArGr | 1342 |
| | antisense strand | GrGrArArGrCrAmCrCmGmAmA | |
| SNCA-845 | Modified 27mer | mUmUmCmArCrUrUrCrArGmUrGmArArAr | 1343 |
| | antisense strand | GrGrGrArArGrCmArCmCmGmA | |
| SNCA-846 | Modified 27mer | mAmUmUmCrArUrUrUrCrAmGrUmGrArAr | 1344 |
| | antisense strand | ArGrGrGrArArGmCrAmCmCmG | |
| SNCA-847 | Modified 27mer | mUmAmUmUrCrUrCrUrUrCmArGmUrGrAr | 1345 |
| | antisense strand | ArArGrGrGrArAmGrCmAmCmC | |
| SNCA-848 | Modified 27mer | mGmUmAmUrUrUrArCrUrUmCrAmGrUrGr | 1346 |
| | antisense strand | ArArArGrGrGrAmArGmCmAmC | |
| SNCA-849 | Modified 27mer | mUmGmUmArUrUrCrArCrUmUrCmArGrUr | 1347 |
| | antisense strand | GrArArArGrGrGmArAmGmCmA | |
| SNCA-850 | Modified 27mer | mAmUmGmUrArUrUrCrArCmUrUmCrArGr | 1348 |
| | antisense strand | UrGrArArArGrGmGrAmAmGmC | |
| SNCA-851 | Modified 27mer | mCmAmUmGrUrUrUrUrCrAmCrUmUrCrAr | 1349 |
| | antisense strand | GrUrGrArArArGmGrGmAmAmG | |
| SNCA-852 | Modified 27mer | mCmCmAmUrGrUrArUrUrCmArCmUrUrCr | 1350 |
| | antisense strand | ArGrUrGrArArAmGrGmGmAmA | |
| SNCA-853 | Modified 27mer | mAmCmCmArUrUrUrArUrUmCrAmCrUrUr | 1351 |
| | antisense strand | CrArGrUrGrArAmArGmGmGmA | |
| SNCA-854 | Modified 27mer | mUmAmCmCrArUrGrUrArUmUrCmArCrUr | 1352 |
| | antisense strand | UrCrArGrUrGrAmArAmGmGmG | |
| SNCA-855 | Modified 27mer | mCmUmAmCrCrUrUrGrUrAmUrUmCrArCr | 1353 |
| | antisense strand | UrUrCrArGrUrGmArAmAmGmG | |
| SNCA-856 | Modified 27mer | mGmCmUmArCrUrArUrGrUmArUmUrCrAr | 1354 |
| | antisense strand | CrUrUrCrArGrUmGrAmAmAmG | |
| SNCA-857 | Modified 27mer | mUmGmCmUrArUrCrArUrGmUrAmUrUrCr | 1355 |
| | antisense strand | ArCrUrUrCrArGmUrGmAmAmA | |
| SNCA-858 | Modified 27mer | mCmUmGmCrUrUrCrCrArUmGrUmArUrUr | 1356 |
| | antisense strand | CrArCrUrUrCrAmGrUmGmAmA | |
| SNCA-859 | Modified 27mer | mCmCmUmGrCrUrArCrCrAmUrGmUrArUr | 1357 |
| | antisense strand | UrCrArCrUrUrCmArGmUmGmA | |
| SNCA-860 | Modified 27mer | mCmCmCmUrGrUrUrArCrCmArUmGrUrAr | 1358 |
| | antisense strand | UrUrCrArCrUrUmCrAmGmUmG | |
| SNCA-861 | Modified 27mer | mAmCmCmCrUrUrCrUrArCmCrAmUrGrUr | 1359 |
| | antisense strand | ArUrUrCrArCrUmUrCmAmGmU | |
| SNCA-863 | Modified 27mer | mAmGmAmCrCrUrUrGrCrUmArCmCrArUr | 1360 |
| | antisense strand | GrUrArUrUrCrAmCrUmUmCmA | |
| SNCA-864 | Modified 27mer | mAmAmGmArCrUrCrUrGrCmUrAmCrCrAr | 1361 |
| | antisense strand | UrGrUrArUrUrCmArCmUmUmC | |
| SNCA-865 | Modified 27mer | mAmAmAmGrArUrCrCrUrGmCrUmArCrCr | 1362 |
| | antisense strand | ArUrGrUrArUrUmCrAmCmUmU | |
| SNCA-867 | Modified 27mer | mAmCmAmArArUrArCrCrCmUrGmCrUrAr | 1363 |
| | antisense strand | CrCrArUrGrUrAmUrUmCmAmC | |
| SNCA-868 | Modified 27mer | mCmAmCmArArUrGrArCrCmCrUmGrCrUr | 1364 |
| | antisense strand | ArCrCrArUrGrUmArUmUmCmA | |
| SNCA-875 | Modified 27mer | mCmAmCmArGrUrArCrArCmArAmArGrAr | 1365 |
| | antisense strand | CrCrCrUrGrCrUmArCmCmAmU | |
| SNCA-881 | Modified 27mer | mAmAmAmArUrUrCrArCrAmGrCmArCrAr | 1366 |
| | antisense strand | CrArArArGrArCmCrCmUmGmC | |
| SNCA-883 | Modified 27mer | mAmCmAmArArUrUrCrCrAmCrAmGrCrAr | 1367 |
| | antisense strand | CrArCrArArArGmArCmCmCmU | |
| SNCA-889 | Modified 27mer | mGmAmAmGrCrUrArCrArAmArAmUrCrCr | 1368 |
| | antisense strand | ArCrArGrCrArCmArCmAmAmA | |
| SNCA-890 | Modified 27mer | mUmGmAmArGrUrCrArCrAmArAmArUrCr | 1369 |
| | antisense strand | CrArCrArGrCrAmCrAmCmAmA | |
| SNCA-891 | Modified 27mer | mUmUmGmArArUrCrCrArCmArAmArArUr | 1370 |
| | antisense strand | CrCrArCrArGrCmArCmAmCmA | |
| SNCA-892 | Modified 27mer | mAmUmUmGrArUrGrCrCrAmCrAmArArAr | 1371 |
| | antisense strand | UrCrCrArCrArGmCrAmCmAmC | |
| SNCA-893 | Modified 27mer | mGmAmUmUrGrUrArGrCrCmArCmArArAr | 1372 |
| | antisense strand | ArUrCrCrArCrAmGrCmAmCmA | |
| SNCA-894 | Modified 27mer | mAmGmAmUrUrUrArArGrCmCrAmCrArAr | 1373 |
| | antisense strand | ArArUrCrCrArCmArGmCmAmC | |
| SNCA-895 | Modified 27mer | mUmAmGmArUrUrGrArArGmCrCmArCrAr | 1374 |
| | antisense strand | ArArArUrCrCrAmCrAmGmCmA | |
| SNCA-897 | Modified 27mer | mCmGmUmArGrUrUrUrGrAmArGmCrCrAr | 1375 |
| | antisense strand | CrArArArArUrCmCrAmCmAmG | |
| SNCA-898 | Modified 27mer | mUmCmGmUrArUrArUrUrGmArAmGrCrCr | 1376 |
| | antisense strand | ArCrArArArArUmCrCmAmCmA | |
| SNCA-900 | Modified 27mer | mCmAmUmCrGrUrArGrArUmUrGmArArGr | 1377 |
| | antisense strand | CrCrArCrArArAmArUmCmCmA | |
| SNCA-901 | Modified 27mer | mAmCmAmUrCrUrUrArGrAmUrUmGrArAr | 1378 |
| | antisense strand | GrCrCrArCrArAmArAmUmCmC | |
| SNCA-956 | Modified 27mer | mAmUmAmGrUrUrArGrGrAmUrUmUrArGr | 1379 |
| | antisense strand | ArArArUrArArGmUrGmGmUmA | |
| SNCA-957 | Modified 27mer | mAmAmUmArGrUrGrArGrGmArUmUrUrAr | 1380 |
| | antisense strand | GrArArArUrArAmGrUmGmGmU | |
| SNCA-958 | Modified 27mer | mAmAmAmUrArUrUrGrArGmGrAmUrUrUr | 1381 |
| | antisense strand | ArGrArArArUrAmArGmUmGmG | |
| SNCA-959 | Modified 27mer | mAmAmAmArUrUrGrUrGrAmGrGmArUrUr | 1382 |
| | antisense strand | UrArGrArArArUmArAmGmUmG | |
| SNCA-961 | Modified 27mer | mAmAmAmArArUrUrArGrUmGrAmGrGrAr | 1383 |
| | antisense strand | UrUrUrArGrArAmArUmAmAmG | |
| SNCA-962 | Modified 27mer | mAmAmAmArArUrArUrArGmUrGmArGrGr | 1384 |
| | antisense strand | ArUrUrUrArGrAmArAmUmAmA | |
| SNCA-963 | Modified 27mer | mCmAmAmArArUrArArUrAmGrUmGrArGr | 1385 |
| | antisense strand | GrArUrUrUrArGmArAmAmUmA | |
| SNCA-964 | Modified 27mer | mAmCmAmArArUrArArArUmArGmUrGrAr | 1386 |
| | antisense strand | GrGrArUrUrUrAmGrAmAmAmU | |
| SNCA-965 | Modified 27mer | mAmAmCmArArUrArArArAmUrAmGrUrGr | 1387 |
| | antisense strand | ArGrGrArUrUrUmArGmAmAmA | |
| SNCA-966 | Modified 27mer | mCmAmAmCrArUrArArArAmArUmArGrUr | 1388 |
| | antisense strand | GrArGrGrArUrUmUrAmGmAmA | |
| SNCA-967 | Modified 27mer | mGmCmAmArCrUrArArArAmArAmUrArGr | 1389 |
| | antisense strand | UrGrArGrGrArUmUrUmAmGmA | |
| SNCA-968 | Modified 27mer | mAmGmCmArArUrArArArAmArAmArUrAr | 1390 |
| | antisense strand | GrUrGrArGrGrAmUrUmUmAmG | |
| SNCA-969 | Modified 27mer | mCmAmGmCrArUrCrArArAmArAmArArUr | 1391 |
| | antisense strand | ArGrUrGrArGrGmArUmUmUmA | |
| SNCA-970 | Modified 27mer | mAmCmAmGrCrUrArCrArAmArAmArArAr | 1392 |
| | antisense strand | UrArGrUrGrArGmGrAmUmUmU | |
| SNCA-971 | Modified 27mer | mAmAmCmArGrUrArArCrAmArAmArArAr | 1393 |
| | antisense strand | ArUrArGrUrGrAmGrGmAmUmU | |
| SNCA-972 | Modified 27mer | mCmAmAmCrArUrCrArArCmArAmArArAr | 1394 |
| | antisense strand | ArArUrArGrUrGmArGmGmAmU | |
| SNCA-973 | Modified 27mer | mAmCmAmArCrUrGrCrArAmCrAmArArAr | 1395 |
| | antisense strand | ArArArUrArGrUmGrAmGmGmA | |
| SNCA-974 | Modified 27mer | mAmAmCmArArUrArGrCrAmArCmArArAr | 1396 |
| | antisense strand | ArArArArUrArGmUrGmAmGmG | |
| SNCA-975 | Modified 27mer | mGmAmAmCrArUrCrArGrCmArAmCrArAr | 1397 |
| | antisense strand | ArArArArArUrAmGrUmGmAmG | |
| SNCA-976 | Modified 27mer | mUmGmAmArCrUrArCrArGmCrAmArCrAr | 1398 |
| | antisense strand | ArArArArArArUmArGmUmGmA | |
| SNCA-977 | Modified 27mer | mCmUmGmArArUrArArCrAmGrCmArArCr | 1399 |
| | antisense strand | ArArArArArArAmUrAmGmUmG | |
| SNCA-978 | Modified 27mer | mUmCmUmGrArUrCrArArCmArGmCrArAr | 1400 |
| | antisense strand | CrArArArArArAmArUmAmGmU | |
| SNCA-979 | Modified 27mer | mUmUmCmUrGrUrArCrArAmCrAmGrCrAr | 1401 |
| | antisense strand | ArCrArArArArAmArAmUmAmG | |
| SNCA-980 | Modified 27mer | mCmUmUmCrUrUrArArCrAmArCmArGrCr | 1402 |
| | antisense strand | ArArCrArArArAmArAmAmUmA | |
| SNCA-981 | Modified 27mer | mAmCmUmUrCrUrGrArArCmArAmCrArGr | 1403 |
| | antisense strand | CrArArCrArArAmArAmAmAmU | |
| SNCA-982 | Modified 27mer | mAmAmCmUrUrUrUrGrArAmCrAmArCrAr | 1404 |
| | antisense strand | GrCrArArCrArAmArAmAmAmA | |
| SNCA-983 | Modified 27mer | mCmAmAmCrUrUrCrUrGrAmArCmArArCr | 1405 |
| | antisense strand | ArGrCrArArCrAmArAmAmAmA | |
| SNCA-984 | Modified 27mer | mAmCmAmArCrUrUrCrUrGmArAmCrArAr | 1406 |
| | antisense strand | CrArGrCrArArCmArAmAmAmA | |
| SNCA-985 | Modified 27mer | mAmAmCmArArUrUrUrCrUmGrAmArCrAr | 1407 |
| | antisense strand | ArCrArGrCrArAmCrAmAmAmA | |
| SNCA-986 | Modified 27mer | mUmAmAmCrArUrCrUrUrCmUrGmArArCr | 1408 |
| | antisense strand | ArArCrArGrCrAmArCmAmAmA | |
| SNCA-987 | Modified 27mer | mCmUmAmArCrUrArCrUrUmCrUmGrArAr | 1409 |
| | antisense strand | CrArArCrArGrCmArAmCmAmA | |
| SNCA-988 | Modified 27mer | mAmCmUmArArUrArArCrUmUrCmUrGrAr | 1410 |
| | antisense strand | ArCrArArCrArGmCrAmAmCmA | |
| SNCA-989 | Modified 27mer | mCmAmCmUrArUrCrArArCmUrUmCrUrGr | 1411 |
| | antisense strand | ArArCrArArCrAmGrCmAmAmC | |
| SNCA-990 | Modified 27mer | mUmCmAmCrUrUrArCrArAmCrUmUrCrUr | 1412 |
| | antisense strand | GrArArCrArArCmArGmCmAmA | |
| SNCA-991 | Modified 27mer | mAmUmCmArCrUrArArCrAmArCmUrUrCr | 1413 |
| | antisense strand | UrGrArArCrArAmCrAmGmCmA | |
| SNCA-992 | Modified 27mer | mAmAmUmCrArUrUrArArCmArAmCrUrUr | 1414 |
| | antisense strand | CrUrGrArArCrAmArCmAmGmC | |
| SNCA-993 | Modified 27mer | mAmAmAmUrCrUrCrUrArAmCrAmArCrUr | 1415 |
| | antisense strand | UrCrUrGrArArCmArAmCmAmG | |
| SNCA-994 | Modified 27mer | mCmAmAmArUrUrArCrUrAmArCmArArCr | 1416 |
| | antisense strand | UrUrCrUrGrArAmCrAmAmCmA | |
| SNCA-995 | Modified 27mer | mGmCmAmArArUrCrArCrUmArAmCrArAr | 1417 |
| | antisense strand | CrUrUrCrUrGrAmArCmAmAmC | |
| SNCA-996 | Modified 27mer | mAmGmCmArArUrUrCrArCmUrAmArCrAr | 1418 |
| | antisense strand | ArCrUrUrCrUrGmArAmCmAmA | |
| SNCA-997 | Modified 27mer | mUmAmGmCrArUrArUrCrAmCrUmArArCr | 1419 |
| | antisense strand | ArArCrUrUrCrUmGrAmAmCmA | |
| SNCA-998 | Modified 27mer | mAmUmAmGrCrUrArArUrCmArCmUrArAr | 1420 |
| | antisense strand | CrArArCrUrUrCmUrGmAmAmC | |
| SNCA-999 | Modified 27mer | mGmAmUmArGrUrArArArUmCrAmCrUrAr | 1421 |
| | antisense strand | ArCrArArCrUrUmCrUmGmAmA | |
| SNCA- | Modified 27mer | mUmGmAmUrArUrCrArArAmUrCmArCrUr | 1422 |
| 1000 | antisense strand | ArArCrArArCrUmUrCmUmGmA | |
| SNCA- | Modified 27mer | mAmUmGmArUrUrGrCrArAmArUmCrArCr | 1423 |
| 1001 | antisense strand | UrArArCrArArCmUrUmCmUmG | |
| SNCA- | Modified 27mer | mUmAmUmGrArUrArGrCrAmArAmUrCrAr | 1424 |
| 1002 | antisense strand | CrUrArArCrArAmCrUmUmCmU | |
| SNCA- | Modified 27mer | mAmUmAmUrGrUrUrArGrCmArAmArUrCr | 1425 |
| 1003 | antisense strand | ArCrUrArArCrAmArCmUmUmC | |
| SNCA- | Modified 27mer | mUmAmUmArUrUrArUrArGmCrAmArArUr | 1426 |
| 1004 | antisense strand | CrArCrUrArArCmArAmCmUmU | |
| SNCA- | Modified 27mer | mAmUmAmUrArUrGrArUrAmGrCmArArAr | 1427 |
| 1005 | antisense strand | UrCrArCrUrArAmCrAmAmCmU | |
| SNCA- | Modified 27mer | mAmAmAmArGrUrCrArCrCmUrAmArArAr | 1428 |
| 1028 | antisense strand | ArUrCrUrUrArUmArAmUmAmU | |
| SNCA- | Modified 27mer | mUmAmAmArArUrArCrArCmCrUmArArAr | 1429 |
| 1029 | antisense strand | ArArUrCrUrUrAmUrAmAmUmA | |
| SNCA- | Modified 27mer | mUmUmAmArArUrGrArCrAmCrCmUrArAr | 1430 |
| 1030 | antisense strand | ArArArUrCrUrUmArUmAmAmU | |
| SNCA- | Modified 27mer | mAmUmUmArArUrArGrArCmArCmCrUrAr | 1431 |
| 1031 | antisense strand | ArArArArUrCrUmUrAmUmAmA | |
| SNCA- | Modified 27mer | mCmAmUmUrArUrArArGrAmCrAmCrCrUr | 1432 |
| 1032 | antisense strand | ArArArArArUrCmUrUmAmUmA | |
| SNCA- | Modified 27mer | mUmCmAmUrUrUrArArArGmArCmArCrCr | 1433 |
| 1033 | antisense strand | UrArArArArArUmCrUmUmAmU | |
| SNCA- | Modified 27mer | mAmUmCmArUrUrArArArAmGrAmCrArCr | 1434 |
| 1034 | antisense strand | CrUrArArArArAmUrCmUmUmA | |
| SNCA- | Modified 27mer | mUmAmUmCrArUrUrArArAmArGmArCrAr | 1435 |
| 1035 | antisense strand | CrCrUrArArArAmArUmCmUmU | |
| SNCA- | Modified 27mer | mGmUmAmUrCrUrUrUrArAmArAmGrArCr | 1436 |
| 1036 | antisense strand | ArCrCrUrArArAmArAmUmCmU | |
| SNCA- | Modified 27mer | mAmGmUmArUrUrArUrUrAmArAmArGrAr | 1437 |
| 1037 | antisense strand | CrArCrCrUrArAmArAmAmUmC | |
| SNCA- | Modified 27mer | mCmAmGmUrArUrCrArUrUmArAmArArGr | 1438 |
| 1038 | antisense strand | ArCrArCrCrUrAmArAmAmAmU | |
| SNCA- | Modified 27mer | mAmCmAmGrUrUrUrCrArUmUrAmArArAr | 1439 |
| 1039 | antisense strand | GrArCrArCrCrUmArAmAmAmA | |
| SNCA- | Modified 27mer | mGmAmCmArGrUrArUrCrAmUrUmArArAr | 1440 |
| 1040 | antisense strand | ArGrArCrArCrCmUrAmAmAmA | |
| SNCA- | Modified 27mer | mAmGmAmCrArUrUrArUrCmArUmUrArAr | 1441 |
| 1041 | antisense strand | ArArGrArCrArCmCrUmAmAmA | |
| SNCA- | Modified 27mer | mUmAmGmArCrUrGrUrArUmCrAmUrUrAr | 1442 |
| 1042 | antisense strand | ArArArGrArCrAmCrCmUmAmA | |
| SNCA- | Modified 27mer | mUmUmAmGrArUrArGrUrAmUrCmArUrUr | 1443 |
| 1043 | antisense strand | ArArArArGrArCmArCmCmUmA | |
| SNCA- | Modified 27mer | mCmUmUmArGrUrCrArGrUmArUmCrArUr | 1444 |
| 1044 | antisense strand | UrArArArArGrAmCrAmCmCmU | |
| SNCA- | Modified 27mer | mUmCmUmUrArUrArCrArGmUrAmUrCrAr | 1445 |
| 1045 | antisense strand | UrUrArArArArGmArCmAmCmC | |
| SNCA- | Modified 27mer | mUmUmCmUrUrUrGrArCrAmGrUmArUrCr | 1446 |
| 1046 | antisense strand | ArUrUrArArArAmGrAmCmAmC | |
| SNCA- | Modified 27mer | mAmUmUmCrUrUrArGrArCmArGmUrArUr | 1447 |
| 1047 | antisense strand | CrArUrUrArArAmArGmAmCmA | |
| SNCA- | Modified 27mer | mUmAmUmUrCrUrUrArGrAmCrAmGrUrAr | 1448 |
| 1048 | antisense strand | UrCrArUrUrArAmArAmGmAmC | |
| SNCA- | Modified 27mer | mUmUmAmUrUrUrUrUrArGmArCmArGrUr | 1449 |
| 1049 | antisense strand | ArUrCrArUrUrAmArAmAmGmA | |
| SNCA- | Modified 27mer | mAmUmUmArUrUrCrUrUrAmGrAmCrArGr | 1450 |
| 1050 | antisense strand | UrArUrCrArUrUmArAmAmAmG | |
| SNCA- | Modified 27mer | mCmAmUmUrArUrUrCrUrUmArGmArCrAr | 1451 |
| 1051 | antisense strand | GrUrArUrCrArUmUrAmAmAmA | |
| SNCA- | Modified 27mer | mUmCmAmUrUrUrUrUrCrUmUrAmGrArCr | 1452 |
| 1052 | antisense strand | ArGrUrArUrCrAmUrUmAmAmA | |
| SNCA- | Modified 27mer | mGmUmCmArUrUrArUrUrCmUrUmArGrAr | 1453 |
| 1053 | antisense strand | CrArGrUrArUrCmArUmUmAmA | |
| SNCA- | Modified 27mer | mCmGmUmCrArUrUrArUrUmCrUmUrArGr | 1454 |
| 1054 | antisense strand | ArCrArGrUrArUmCrAmUmUmA | |
| SNCA- | Modified 27mer | mAmCmGmUrCrUrUrUrArUmUrCmUrUrAr | 1455 |
| 1055 | antisense strand | GrArCrArGrUrAmUrCmAmUmU | |
| SNCA- | Modified 27mer | mUmAmCmGrUrUrArUrUrAmUrUmCrUrUr | 1456 |
| 1056 | antisense strand | ArGrArCrArGrUmArUmCmAmU | |
| SNCA- | Modified 27mer | mAmUmAmCrGrUrCrArUrUmArUmUrCrUr | 1457 |
| 1057 | antisense strand | UrArGrArCrArGmUrAmUmCmA | |
| SNCA- | Modified 27mer | mAmAmUmArCrUrUrCrArUmUrAmUrUrCr | 1458 |
| 1058 | antisense strand | UrUrArGrArCrAmGrUmAmUmC | |
| SNCA- | Modified 27mer | mUmAmUmArUrUrUrUrArAmCrAmArArUr | 1459 |
| 1078 | antisense strand | UrUrCrArCrArAmUrAmCmGmU | |
| SNCA- | Modified 27mer | mAmUmAmUrArUrArUrUrAmArCmArArAr | 1460 |
| 1079 | antisense strand | UrUrUrCrArCrAmArUmAmCmG | |
| SNCA- | Modified 27mer | mUmAmUmArUrUrUrArUrUmArAmCrArAr | 1461 |
| 1080 | antisense strand | ArUrUrUrCrArCmArAmUmAmC | |
| SNCA- | Modified 27mer | mAmAmGmUrArUrUrArUrAmUrAmUrArUr | 1462 |
| 1086 | antisense strand | UrArArCrArArAmUrUmUmCmA | |
| SNCA- | Modified 27mer | mUmAmAmGrUrUrUrUrArUmArUmArUrAr | 1463 |
| 1087 | antisense strand | UrUrArArCrArAmArUmUmUmC | |
| SNCA- | Modified 27mer | mUmUmAmArGrUrArUrUrAmUrAmUrArUr | 1464 |
| 1088 | antisense strand | ArUrUrArArCrAmArAmUmUmU | |
| SNCA- | Modified 27mer | mUmUmUmArArUrUrArUrUmArUmArUrAr | 1465 |
| 1089 | antisense strand | UrArUrUrArArCmArAmAmUmU | |
| SNCA- | Modified 27mer | mUmUmUmUrArUrGrUrArUmUrAmUrArUr | 1466 |
| 1090 | antisense strand | ArUrArUrUrArAmCrAmAmAmU | |
| SNCA- | Modified 27mer | mUmUmUmUrUrUrArGrUrAmUrUmArUrAr | 1467 |
| 1091 | antisense strand | UrArUrArUrUrAmArCmAmAmA | |
| SNCA- | Modified 27mer | mAmUmUmUrUrUrArArGrUmArUmUrArUr | 1468 |
| 1092 | antisense strand | ArUrArUrArUrUmArAmCmAmA | |
| SNCA- | Modified 27mer | mUmAmUmUrUrUrUrArArGmUrAmUrUrAr | 1469 |
| 1093 | antisense strand | UrArUrArUrArUmUrAmAmCmA | |
| SNCA- | Modified 27mer | mAmGmGmUrGrUrArUrArGmUrUmUrCrAr | 1470 |
| 1116 | antisense strand | UrGrCrUrCrArCmArUmAmUmU | |
| SNCA- | Modified 27mer | mUmAmGmGrUrUrCrArUrAmGrUmUrUrCr | 1471 |
| 1117 | antisense strand | ArUrGrCrUrCrAmCrAmUmAmU | |
| SNCA- | Modified 27mer | mUmAmUmArGrUrUrGrCrAmUrAmGrUrUr | 1472 |
| 1119 | antisense strand | UrCrArUrGrCrUmCrAmCmAmU | |
| SNCA- | Modified 27mer | mUmUmAmUrArUrGrUrGrCmArUmArGrUr | 1473 |
| 1120 | antisense strand | UrUrCrArUrGrCmUrCmAmCmA | |
| SNCA- | Modified 27mer | mUmUmUmArUrUrGrGrUrGmCrAmUrArGr | 1474 |
| 1121 | antisense strand | UrUrUrCrArUrGmCrUmCmAmC | |
| SNCA- | Modified 27mer | mAmUmUmUrArUrArGrGrUmGrCmArUrAr | 1475 |
| 1122 | antisense strand | GrUrUrUrCrArUmGrCmUmCmA | |
| SNCA- | Modified 27mer | mUmAmUmUrUrUrUrArGrGmUrGmCrArUr | 1476 |
| 1123 | antisense strand | ArGrUrUrUrCrAmUrGmCmUmC | |
| SNCA- | Modified 27mer | mGmUmAmUrUrUrArUrArGmGrUmGrCrAr | 1477 |
| 1124 | antisense strand | UrArGrUrUrUrCmArUmGmCmU | |
| SNCA- | Modified 27mer | mAmGmUmArUrUrUrArUrAmGrGmUrGrCr | 1478 |
| 1125 | antisense strand | ArUrArGrUrUrUmCrAmUmGmC | |
| SNCA- | Modified 27mer | mUmAmGmUrArUrUrUrArUmArGmGrUrGr | 1479 |
| 1126 | antisense strand | CrArUrArGrUrUmUrCmAmUmG | |
| SNCA- | Modified 27mer | mUmUmAmGrUrUrUrUrUrAmUrAmGrGrUr | 1480 |
| 1127 | antisense strand | GrCrArUrArGrUmUrUmCmAmU | |
| SNCA- | Modified 27mer | mUmUmUmArGrUrArUrUrUmArUmArGrGr | 1481 |
| 1128 | antisense strand | UrGrCrArUrArGmUrUmUmCmA | |
| SNCA- | Modified 27mer | mAmUmUmUrArUrUrArUrUmUrAmUrArGr | 1482 |
| 1129 | antisense strand | GrUrGrCrArUrAmGrUmUmUmC | |
| SNCA- | Modified 27mer | mUmAmUmUrUrUrGrUrArUmUrUmArUrAr | 1483 |
| 1130 | antisense strand | GrGrUrGrCrArUmArGmUmUmU | |
| SNCA- | Modified 27mer | mAmUmAmUrUrUrArGrUrAmUrUmUrArUr | 1484 |
| 1131 | antisense strand | ArGrGrUrGrCrAmUrAmGmUmU | |
| SNCA- | Modified 27mer | mCmAmUmArUrUrUrArGrUmArUmUrUrAr | 1485 |
| 1132 | antisense strand | UrArGrGrUrGrCmArUmAmGmU | |
| SNCA- | Modified 27mer | mUmCmAmUrArUrUrUrArGmUrAmUrUrUr | 1486 |
| 1133 | antisense strand | ArUrArGrGrUrGmCrAmUmAmG | |
| SNCA- | Modified 27mer | mUmAmAmUrUrUrUrCrArCmCrAmUrUrUr | 1487 |
| 1194 | antisense strand | ArUrArUrArCrAmArAmCmAmC | |
| SNCA- | Modified 27mer | mUmUmAmArUrUrCrUrCrAmCrCmArUrUr | 1488 |
| 1195 | antisense strand | UrArUrArUrArCmArAmAmCmA | |
| SNCA- | Modified 27mer | mUmUmUmArArUrUrCrUrCmArCmCrArUr | 1489 |
| 1196 | antisense strand | UrUrArUrArUrAmCrAmAmAmC | |
| SNCA- | Modified 27mer | mUmUmUmUrArUrUrUrCrUmCrAmCrCrAr | 1490 |
| 1197 | antisense strand | UrUrUrArUrArUmArCmAmAmA | |
| SNCA- | Modified 27mer | mAmUmUmUrUrUrArUrUrCmUrCmArCrCr | 1491 |
| 1198 | antisense strand | ArUrUrUrArUrAmUrAmCmAmA | |
| SNCA- | Modified 27mer | mUmAmUmUrUrUrArArUrUmCrUmCrArCr | 1492 |
| 1199 | antisense strand | CrArUrUrUrArUmArUmAmCmA | |
| SNCA- | Modified 27mer | mUmUmAmUrUrUrUrArArUmUrCmUrCrAr | 1493 |
| 1200 | antisense strand | CrCrArUrUrUrAmUrAmUmAmC | |
| SNCA- | Modified 27mer | mUmUmUmArUrUrUrUrArAmUrUmCrUrCr | 1494 |
| 1201 | antisense strand | ArCrCrArUrUrUmArUmAmUmA | |
| SNCA- | Modified 27mer | mUmUmUmUrArUrUrUrUrAmArUmUrCrUr | 1495 |
| 1202 | antisense strand | CrArCrCrArUrUmUrAmUmAmU | |
| SNCA- | Modified 27mer | mGmUmUmUrUrUrUrUrUrUmArAmUrUrCr | 1496 |
| 1203 | antisense strand | UrCrArCrCrArUmUrUmAmUmA | |
| SNCA- | Modified 27mer | mCmGmUmUrUrUrArUrUrUmUrAmArUrUr | 1497 |
| 1204 | antisense strand | CrUrCrArCrCrAmUrUmUmAmU | |
| SNCA- | Modified 27mer | mAmCmGmUrUrUrUrArUrUmUrUmArArUr | 1498 |
| 1205 | antisense strand | UrCrUrCrArCrCmArUmUmUmA | |
| SNCA- | Modified 27mer | mAmAmCmGrUrUrUrUrArUmUrUmUrArAr | 1499 |
| 1206 | antisense strand | UrUrCrUrCrArCmCrAmUmUmU | |
| SNCA- | Modified 27mer | mUmAmAmCrGrUrUrUrUrAmUrUmUrUrAr | 1500 |
| 1207 | antisense strand | ArUrUrCrUrCrAmCrCmAmUmU | |
| SNCA- | Modified 27mer | mAmUmAmArCrUrUrUrUrUmArUmUrUrUr | 1501 |
| 1208 | antisense strand | ArArUrUrCrUrCmArCmCmAmU | |
| SNCA- | Modified 27mer | mUmUmAmArArUrUrGrArGmArUmGrGrGr | 1502 |
| 1250 | antisense strand | ArUrArArArArAmUrAmAmAmA | |
| SNCA- | Modified 27mer | mUmAmUmUrArUrArGrUrGmArGmArUrGr | 1503 |
| 1252 | antisense strand | GrGrArUrArArAmArAmUmAmA | |
| SNCA- | Modified 27mer | mUmUmAmUrUrUrArArGrUmGrAmGrArUr | 1504 |
| 1253 | antisense strand | GrGrGrArUrArAmArAmAmUmA | |
| SNCA- | Modified 27mer | mAmUmUmArUrUrArArArGmUrGmArGrAr | 1505 |
| 1254 | antisense strand | UrGrGrGrArUrAmArAmAmAmU | |
| SNCA- | Modified 27mer | mUmAmUmUrArUrUrArArAmGrUmGrArGr | 1506 |
| 1255 | antisense strand | ArUrGrGrGrArUmArAmAmAmA | |
| SNCA- | Modified 27mer | mUmUmAmUrUrUrUrUrArAmArGmUrGrAr | 1507 |
| 1256 | antisense strand | GrArUrGrGrGrAmUrAmAmAmA | |
| SNCA- | Modified 27mer | mUmUmUmArUrUrArUrUrAmArAmGrUrGr | 1508 |
| 1257 | antisense strand | ArGrArUrGrGrGmArUmAmAmA | |
| SNCA- | Modified 27mer | mUmUmUmUrArUrUrArUrUmArAmArGrUr | 1509 |
| 1258 | antisense strand | GrArGrArUrGrGmGrAmUmAmA | |
| SNCA- | Modified 27mer | mUmUmUmUrUrUrUrUrArUmUrAmArArGr | 1510 |
| 1259 | antisense strand | UrGrArGrArUrGmGrGmAmUmA | |
| SNCA- | Modified 27mer | mAmUmUmUrUrUrArUrUrAmUrUmArArAr | 1511 |
| 1260 | antisense strand | GrUrGrArGrArUmGrGmGmAmU | |
| SNCA- | Modified 27mer | mGmAmUmUrUrUrUrArUrUmArUmUrArAr | 1512 |
| 1261 | antisense strand | ArGrUrGrArGrAmUrGmGmGmA | |
| SNCA- | Modified 27mer | mUmGmAmUrUrUrUrUrArUmUrAmUrUrAr | 1513 |
| 1262 | antisense strand | ArArGrUrGrArGmArUmGmGmG | |
| SNCA- | Modified 27mer | mAmUmGmArUrUrUrUrUrAmUrUmArUrUr | 1514 |
| 1263 | antisense strand | ArArArGrUrGrAmGrAmUmGmG | |
| SNCA- | Modified 27mer | mCmAmUmGrArUrUrUrUrUmArUmUrArUr | 1515 |
| 1264 | antisense strand | UrArArArGrUrGmArGmAmUmG | |
| SNCA- | Modified 27mer | mGmCmAmUrGrUrUrUrUrUmUrAmUrUrAr | 1516 |
| 1265 | antisense strand | UrUrArArArGrUmGrAmGmAmU | |
| SNCA- | Modified 27mer | mAmGmCmArUrUrArUrUrUmUrUmArUrUr | 1517 |
| 1266 | antisense strand | ArUrUrArArArGmUrGmAmGmA | |
| SNCA- | Modified 27mer | mAmAmGmCrArUrGrArUrUmUrUmUrArUr | 1518 |
| 1267 | antisense strand | UrArUrUrArArAmGrUmGmAmG | |
| SNCA- | Modified 27mer | mUmUmCmUrArUrArArUrUmCrCmUrCrCr | 1519 |
| 1351 | antisense strand | UrUrCrUrUrCrAmArAmUmGmG | |
| SNCA- | Modified 27mer | mAmUmUmUrUrUrUrCrUrAmCrCmUrCrUr | 1520 |
| 1365 | antisense strand | UrCrUrArArArAmUrUmCmCmU | |
| SNCA- | Modified 27mer | mAmUmGmUrUrUrCrArUrUmUrUmCrUrCr | 1521 |
| 1372 | antisense strand | UrArCrCrUrCrUmUrCmUmAmA | |
| SNCA- | Modified 27mer | mAmAmUmGrUrUrCrCrArUmUrUmUrCrUr | 1522 |
| 1373 | antisense strand | CrUrArCrCrUrCmUrUmCmUmA | |
| SNCA- | Modified 27mer | mUmAmAmUrGrUrUrCrCrAmUrUmUrUrCr | 1523 |
| 1374 | antisense strand | UrCrUrArCrCrUmCrUmUmCmU | |
| SNCA- | Modified 27mer | mUmUmAmArUrUrUrUrCrCmArUmUrUrUr | 1524 |
| 1375 | antisense strand | CrUrCrUrArCrCmUrCmUmUmC | |
| SNCA- | Modified 27mer | mGmUmUmArArUrGrUrUrCmCrAmUrUrUr | 1525 |
| 1376 | antisense strand | UrCrUrCrUrArCmCrUmCmUmU | |
| SNCA- | Modified 27mer | mGmGmUmUrArUrUrGrUrUmCrCmArUrUr | 1526 |
| 1377 | antisense strand | UrUrCrUrCrUrAmCrCmUmCmU | |
| SNCA- | Modified 27mer | mAmGmGmGrUrUrArArUrGmUrUmCrCrAr | 1527 |
| 1379 | antisense strand | UrUrUrUrCrUrCmUrAmCmCmU | |
| SNCA- | Modified 27mer | mUmAmGmGrGrUrUrArArUmGrUmUrCrCr | 1528 |
| 1380 | antisense strand | ArUrUrUrUrCrUmCrUmAmCmC | |
| SNCA- | Modified 27mer | mGmUmAmGrGrUrUrUrArAmUrGmUrUrCr | 1529 |
| 1381 | antisense strand | CrArUrUrUrUrCmUrCmUmAmC | |
| SNCA- | Modified 27mer | mUmGmUmArGrUrGrUrUrAmArUmGrUrUr | 1530 |
| 1382 | antisense strand | CrCrArUrUrUrUmCrUmCmUmA | |
| SNCA- | Modified 27mer | mGmUmGmUrArUrGrGrUrUmArAmUrGrUr | 1531 |
| 1383 | antisense strand | UrCrCrArUrUrUmUrCmUmCmU | |
| SNCA- | Modified 27mer | mAmGmUmGrUrUrGrGrGrUmUrAmArUrGr | 1532 |
| 1384 | antisense strand | UrUrCrCrArUrUmUrUmCmUmC | |
| SNCA- | Modified 27mer | mGmAmGmUrGrUrArGrGrGmUrUmArArUr | 1533 |
| 1385 | antisense strand | GrUrUrCrCrArUmUrUmUmCmU | |
| SNCA- | Modified 27mer | mUmCmCmGrArUrUrGrUrAmGrGmGrUrUr | 1534 |
| 1388 | antisense strand | ArArUrGrUrUrCmCrAmUmUmU | |
| SNCA- | Modified 27mer | mCmAmUmArCrUrArArArAmCrAmCrArCr | 1535 |
| 1428 | antisense strand | UrUrCrUrGrGrCmArGmUmGmU | |
| SNCA- | Modified 27mer | mGmCmAmUrArUrCrArArAmArCmArCrAr | 1536 |
| 1429 | antisense strand | CrUrUrCrUrGrGmCrAmGmUmG | |
| SNCA- | 36mer sense strand | UGGUGUAAAGGAAUUCAUUAGCAGCC | 1537 |
| 0227 | | GAAAGGCUGC | |
| SNCA- | 36mer sense strand | GGUGUAAAGGAAUUCAU | 1538 |
| 0228 | | UAAGCAGCCGAAAGGCU | |
| | | GC | |
| SNCA- | 36mer sense strand | CAUUAGCCAUGGAUGUAUUAGCAGCC | 1539 |
| 0242 | | GAAAGGCUGC | |
| SNCA- | 36mer sense strand | UUAGCCAUGGAUGUAUUCAAGCAGCC | 1540 |
| 0244 | | GAAAGGCUGC | |
| SNCA- | 36mer sense strand | CCAUGGAUGUAUUCAUGAAAGCAGCC | 1541 |
| 0248 | | GAAAGGCUGC | |
| SNCA- | 36mer sense strand | AUGUAUUCAUGAAAGGACUAGCAGCC | 1542 |
| 0254 | | GAAAGGCUGC | |
| SNCA- | 36mer sense strand | AAAGACAAAAGAGGGUGUUAGCAGCC | 1543 |
| 0342 | | GAAAGGCUGC | |
| SNCA- | 36mer sense strand | AGAGGGUGUUCUCUAUGUAAGCAGCC | 1544 |
| 0351 | | GAAAGGCUGC | |
| SNCA- | 36mer sense strand | AAGACCAAAGAGCAAGUGAAGCAGCC | 1545 |
| 0421 | | GAAAGGCUGC | |
| SNCA- | 36mer sense strand | CAAAGAGCAAGUGACAAAUAGCAGCC | 1546 |
| 0426 | | GAAAGGCUGC | |
| SNCA- | 36mer sense strand | AAGUGACAAAUGUUGGAGGAGCAGCC | 1547 |
| 0434 | | GAAAGGCUGC | |
| SNCA- | 36mer sense strand | CGAACCUGAAGCCUAAGAAAGCAGCC | 1548 |
| 0657 | | GAAAGGCUGC | |
| SNCA- | 36mer sense strand | AAUAUCUUUGCUCCCAGUUAGCAGCC | 1549 |
| 0675 | | GAAAGGCUGC | |
| SNCA- | 36mer sense strand | AGUUCCAAUGUGCCCAGUCAGCAGCC | 1550 |
| 0737 | | GAAAGGCUGC | |
| SNCA- | 36mer sense strand | CAGUCAUGACAUUUCUCAAAGCAGCC | 1551 |
| 0751 | | GAAAGGCUGC | |
| SNCA- | 36mer sense strand | UGACAUUUCUCAAAGUUUUAGCAGCC | 1552 |
| 0757 | | GAAAGGCUGC | |
| SNCA- | 36mer sense strand | CAGCAGUGAUUGAAGUAUCAGCAGCC | 1553 |
| 0801 | | GAAAGGCUGC | |
| SNCA- | 36mer sense strand | GAUGUAUUCAUGAAAGGACAGCAGCC | 1554 |
| 0291 | | GAAAGGCUGC | |
| SNCA- | 36mer sense strand | UGUUGCUGUUGUUCAGAAGAGCAGCC | 1555 |
| 0986 | | GAAAGGCUGC | |
| SNCA- | 36mer sense strand | AGAUUUUUAGGUGUCUUUUAGCAGCC | 1556 |
| 1034 | | GAAAGGCUGC | |
| SNCA- | 36mer sense strand | GGUGUCUUUUAAUGAUACUAGCAGCC | 1557 |
| 1043 | | GAAAGGCUGC | |
| SNCA- | 36mer sense strand | UGUAAAGGAAUUCAUUAGCAGCAGCC | 1558 |
| 0230 | | GAAAGGCUGC | |
| SNCA- | 36mer sense strand | AUGGAUGUAUUCAUGAAAGAGCAGCC | 1559 |
| 0250 | | GAAAGGCUGC | |
| SNCA- | 36mer sense strand | AGAGCAAGUGACAAAUGUUAGCAGCC | 1560 |
| 0429 | | GAAAGGCUGC | |
| SNCA- | 36mer sense strand | AGGGUAUCAAGACUACGAAAGCAGCC | 1561 |
| 0642 | | GAAAGGCUGC | |
| SNCA- | 36mer sense strand | AUAUCUUUGCUCCCAGUUUAGCAGCC | 1562 |
| 0676 | | GAAAGGCUGC | |
| SNCA- | 36mer sense strand | AGUGCUCAGUUCCAAUGUGAGCAGCC | 1563 |
| 0730 | | GAAAGGCUGC | |
| SNCA- | 36mer sense strand | AGUCAUGACAUUUCUCAAAAGCAGCC | 1564 |
| 0752 | | GAAAGGCUGC | |
| SNCA- | 36mer sense strand | CAUUUCUCAAAGUUUUUACAGCAGCC | 1565 |
| 0760 | | GAAAGGCUGC | |
| SNCA- | 36mer sense strand | UCAGCAGUGAUUGAAGUAUAGCAGCC | 1566 |
| 0800 | | GAAAGGCUGC | |
| SNCA- | 36mer sense strand | GUGCUGUGGAUUUUGUGGCAGCAGCC | 1567 |
| 0892 | | GAAAGGCUGC | |
| SNCA- | 36mer sense strand | UGCUGUGGAUUUUGUGGCUAGCAGCC | 1568 |
| 0893 | | GAAAGGCUGC | |
| SNCA- | 36mer sense strand | UGUUCAGAAGUUGUUAGUGAGCAGCC | 1569 |
| 0995 | | GAAAGGCUGC | |
| SNCA- | 36mer sense strand | AGUUGUUAGUGAUUUGCUAAGCAGCC | 1570 |
| 1003 | | GAAAGGCUGC | |
| SNCA- | 36mer sense strand | CUUUUAAUGAUACUGUCUAAGCAGCC | 1571 |
| 1048 | | GAAAGGCUGC | |
| SNCA- | 22mer antisense | UAAUGAAUUCCUUUACACCAGG | 1572 |
| 0227 | strand | | |
| SNCA- | 22mer antisense | UUAAUGAAUUCCUUUACACCGG | 1573 |
| 0228 | strand | | |
| SNCA- | 22mer antisense | UAAUACAUCCAUGGCUAAUGGG | 1574 |
| 0242 | strand | | |
| SNCA- | 22mer antisense | UUGAAUACAUCCAUGGCUAAGG | 1575 |
| 0244 | strand | | |
| SNCA- | 22mer antisense | UUUCAUGAAUACAUCCAUGGGG | 1576 |
| 0248 | strand | | |
| SNCA- | 22mer antisense | UAGUCCUUUCAUGAAUACAUGG | 1577 |
| 0254 | strand | | |
| SNCA- | 22mer antisense | UAACACCCUCUUUUGUCUUUGG | 1578 |
| 0342 | strand | | |
| SNCA- | 22mer antisense | UUACAUAGAGAACACCCUCUGG | 1579 |
| 0351 | strand | | |
| SNCA- | 22mer antisense | UUCACUUGCUCUUUGGUCUUGG | 1580 |
| 0421 | strand | | |
| SNCA- | 22mer antisense | UAUUUGUCACUUGCUCUUUGGG | 1581 |
| 0426 | strand | | |
| SNCA- | 22mer antisense | UCCUCCAACAUUUGUCACUUGG | 1582 |
| 0434 | strand | | |
| SNCA- | 22mer antisense | UUUCUUAGGCUUCAGGUUCGGG | 1583 |
| 0657 | strand | | |
| SNCA- | 22mer antisense | UAACUGGGAGCAAAGAUAUUGG | 1584 |
| 0675 | strand | | |
| SNCA- | 22mer antisense | UGACUGGGCACAUUGGAACUGG | 1585 |
| 0737 | strand | | |
| SNCA- | 22mer antisense | UUUGAGAAAUGUCAUGACUGGG | 1586 |
| 0751 | strand | | |
| SNCA- | 22mer antisense | UAAAACUUUGAGAAAUGUCAGG | 1587 |
| 0757 | strand | | |
| SNCA- | 22mer antisense | UGAUACUUCAAUCACUGCUGGG | 1588 |
| 0801 | strand | | |
| SNCA- | 22mer antisense | UGUCCUUUCAUGAAUACAUCGG | 1589 |
| 0291 | strand | | |
| SNCA- | 22mer antisense | UCUUCUGAACAACAGCAACAGG | 1590 |
| 0986 | strand | | |
| SNCA- | 22mer antisense | UAAAAGACACCUAAAAAUCUGG | 1591 |
| 1034 | strand | | |
| SNCA- | 22mer antisense | UAGUAUCAUUAAAAGACACCGG | 1592 |
| 1043 | strand | | |
| SNCA- | 22mer antisense | UGCUAAUGAAUUCCUUUACAGG | 1593 |
| 0230 | strand | | |
| SNCA- | 22mer antisense | UCUUUCAUGAAUACAUCCAUGG | 1594 |
| 0250 | strand | | |
| SNCA- | 22mer antisense | UAACAUUUGUCACUUGCUCUGG | 1595 |
| 0429 | strand | | |
| SNCA- | 22mer antisense | UUUCGUAGUCUUGAUACCCUGG | 1596 |
| 0642 | strand | | |
| SNCA- | 22mer antisense | UAAACUGGGAGCAAAGAUAUGG | 1597 |
| 0676 | strand | | |
| SNCA- | 22mer antisense | UCACAUUGGAACUGAGCACUGG | 1598 |
| 0730 | strand | | |
| SNCA- | 22mer antisense | UUUUGAGAAAUGUCAUGACUGG | 1599 |
| 0752 | strand | | |
| SNCA- | 22mer antisense | UGUAAAAACUUUGAGAAAUGGG | 1600 |
| 0760 | strand | | |
| SNCA- | 22mer antisense | UAUACUUCAAUCACUGCUGAGG | 1601 |
| 0800 | strand | | |
| SNCA- | 22mer antisense | UGCCACAAAAUCCACAGCACGG | 1602 |
| 0892 | strand | | |
| SNCA- | 22mer antisense | UAGCCACAAAAUCCACAGCAGG | 1603 |
| 0893 | strand | | |
| SNCA- | 22mer antisense | UCACUAACAACUUCUGAACAGG | 1604 |
| 0995 | strand | | |
| SNCA- | 22mer antisense | UUAGCAAAUCACUAACAACUGG | 1605 |
| 1003 | strand | | |
| SNCA- | 22mer antisense | UUAGACAGUAUCAUUAAAAGGG | 1606 |
| 1048 | strand | | |
| SNCA- | Modified 36mer | [mUs][mG][fG][mU][fG][mU][mA][fA][mA][ | 1607 |
| 0227 | sense strand | fG][mG][mA][fA][mU][fU][mC][fA][mU][mU | |
| | | ][mA][mG][mC][mA][mG][mC][mC][mG][ad | |
| | | emA-GalNAc][ademA-GalNAc][ademA- | |
| | | GalNAc][mG][mG ][mC][mU][mG][mC] | |
| SNCA- | Modified 36mer | [mGs][mG][fU][mG][fU][mA][mA][fA][mG][ | 1608 |
| 0228 | sense strand | fG][mA][fA][fU][mU][fC][mA][fU][mU][mA | |
| | | ][mA][mG][mC][mA][mG][mC][mC][mG][ad | |
| | | emA-GalNAc][ademA-GalNAc][ademA- | |
| | | GalNAc][mG][mG][mC][mU][mG][mC] | |
| SNCA- | Modified 36mer | [mCs][mA][fU][mU][fA][mG][mC][fC][mA][ | 1609 |
| 0242 | sense strand | fU][mG][fG][fA][mU][fG][mU][fA][mU][mU | |
| | | ][mA][mG][mC][mA][mG][mC][mC][mG][ad | |
| | | emA-GalNAc][ademA-GalNAc][ademA- | |
| | | GalNAc][mG][mG][mC][mU][mG][mC] | |
| SNCA- | Modified 36mer | [mUs][mU][fA][mG][fC][mC][mA][fU][mG][ | 1610 |
| 0244 | sense strand | fG][mA][fU][fG][mU][fA][mU][fU][mC][mA | |
| | | ][mA][mG][mC][mA][mG][mC][mC][mG][ad | |
| | | emA-GalNAc][ademA-GalNAc][ademA- | |
| | | GalNAc][mG][mG][mC][mU][mG][mC] | |
| SNCA- | Modified 36mer | [mCs][mC][fA][mU][fG][mG][mA][fU][mG] | 1611 |
| 0248 | sense strand | [fU][mA][fU][mC][fA][mU][fG][mA][mA] | |
| | | [mA][mG][mC][mA][mG][mC][mC][mG][ad | |
| | | emA-GalNAc][ademA-GalNAc][ademA- | |
| | | GalNAc][mG][mG][mC][mU][mG][mC] | |
| SNCA- | Modified 36mer | [mAs][mU][fG][mU][fA][mU][mU][fC][mA][ | 1612 |
| 0254 | sense strand | fU][mG][fA][fA][mA][fG][mG][fA][mC][mU | |
| | | ][mA][mG][mC][mA][mG][mC][mC][mG][ad | |
| | | emA-GalNAc][ademA-GalNAc][ademA- | |
| | | GalNAc][mG][mG][mC][mU][mG][mC] | |
| SNCA- | Modified 36mer | [mAs][mA][fA][mG][fA][mC][mA][fA][mA][ | 1613 |
| 0342 | sense strand | fA][mG][fA][fG][mG][fG][mU][fG][mU][mU | |
| | | ][mA][mG][mC][mA][mG][mC][mC][mG][ad | |
| | | emA-GalNAc][ademA-GalNAc][ademA- | |
| | | GalNAc][mG][mG][mC][mU][mG][mC] | |
| SNCA- | Modified 36mer | [mAs][mG][fA][mG][fG][mG][mU][fG][mU][ | 1614 |
| 0351 | sense strand | fU][mC][fU][fC][mU][fA][mU][fG][mU][mA | |
| | | ][mA][mG][mC][mA][mG][mC][mC][mG][ad | |
| | | emA-GalNAc][ademA-GalNAc][ademA- | |
| | | GalNAc][mG][mG][mC][mU][mG][mC] | |
| SNCA- | Modified 36mer | [mAs][mA][fG][mA][fC][mC][mA][fA][mA][ | 1615 |
| 0421 | sense strand | fG][mA][fG][fC][mA][fA][mG][fU][mG][mA | |
| | | ][mA][mG][mC][mA][mG][mC][mC][mG][ad | |
| | | emA-GalNAc][ademA-GalNAc][ademA- | |
| | | GalNAc][mG][mG][mC][mU][mG][mC] | |
| SNCA- | Modified 36mer | [mCs][mA][fA][mA][fG][mA][mG][fC][mA][ | 1616 |
| 0426 | sense strand | fA][mG][fU][fG][mA][fC][mA][fA][mA][mU | |
| | | ][mA][mG][mC][mA][mG][mC][mC][mG][ad | |
| | | emA-GalNAc][ademA-GalNAc][ademA- | |
| | | GalNAc][mG][mG][mC][mU][mG][mC] | |
| SNCA- | Modified 36mer | [mAs][mA][fG][mU][fG][mA][mC][fA][mA][ | 1617 |
| 0434 | sense strand | fA][mU][fG][fU][mU][fG][mG][fA][mG][mG | |
| | | ][mA][mG][mC][mA][mG][mC][mC][mG][ad | |
| | | emA-GalNAc][ademA-GalNAc][ademA- | |
| | | GalNAc][mG][mG][mC][mU][mG][mC] | |
| SNCA- | Modified 36mer | [mCs][mG][fA][mA][fC][mC][mU][fG][mA][ | 1618 |
| 0657 | sense strand | fA][mG][fC][fC][mU][fA][mA][fG][mA][mA | |
| | | emA-GalNAc][ademA-GalNAc][ademA- | |
| | | GalNAc][mG][mG][mC][mU][mG][mC] | |
| SNCA- | Modified 36mer | [mAs][mA][fU][mA][fU][mC][mU][fU][mU][ | 1619 |
| 0675 | sense strand | fG][mC][fU][fC][mC][fC][mA][fG][mU][mU] | |
| | | [mA][mG][mC][mA][mG][mC][mC][mG][ade | |
| | | mA-GalNAc][ademA-GalNAc][ademA- | |
| | | GalNAc][mG][mG][mC][mU][mG][mC] | |
| SNCA- | Modified 36mer | [mAs][mG][fU][mU][fC][mC][mA][ | 1620 |
| 0737 | sense strand | fA][mU][fG][mU][fG][fC][mC][fC | |
| | | ][mA][fG][mU][mC][mA][mG][mC][ | |
| | | mA][mG][mC][mC][mG][ademA-GalN | |
| | | Ac][ademA-GalNAc][ademA-GalNAc | |
| | | ][mG][mG][mC][mU][mG][mC] | |
| SNCA- | Modified 36mer | [mCs][mA][fG][mU][fC][mA][mU][ | 1621 |
| 0751 | sense strand | fG][mA][fC][mA][fU][fU][mU][fC | |
| | | ][mU][fC][mA][mA][mA][mG][mC][ | |
| | | mA][mG][mC][mC][mG][ademA-GalN | |
| | | Ac][ademA-GalNAc][ademA-GalNAc | |
| | | ][mG][mG][mC][mU][mG][mC] | |
| SNCA- | Modified 36mer | [mUs][mG][fA][mC][fA][mU][mU][ | 1622 |
| 0757 | sense strand | fU][mC][fU][mC][fA][fA][mA][fG | |
| | | ][mU][fU][mU][mU][mA][mG][mC][ | |
| | | mA][mG][mC][mC][mG][ademA-GalN | |
| | | Ac][ademA-GalNAc][ademA-GalNAc | |
| | | ][mG][mG][mC][mU][mG][mC] | |
| SNCA- | Modified 36mer | [mCs][mA][fG][mC][fA][mG][mU][ | 1623 |
| 0801 | sense strand | fG][mA][fU][mU][fG][fA][mA][fG | |
| | | ][mU][fA][mU][mC][mA][mG][mC][ | |
| | | mA][mG][mC][mC][mG][ademA-GalN | |
| | | Ac][ademA-GalNAc][ademA-GalNAc | |
| | | ][mG][mG][mC][mU][mG][mC] | |
| SNCA- | Modified 36mer | [mGs][mA][mU][mG][mU][mA][mU][ | 1624 |
| 0291 | sense strand | fU][fC][fA][fU][mG][mA][mA][mA | |
| | | ][mG][mG][mA][mC][mA][mG][mC][ | |
| | | mA][mG][mC][mC][mG][ademA-GalN | |
| | | Ac][ademA-GalNAc][ademA-GalNAc | |
| | | ][mG][mG][mC][mU][mG][mC] | |
| SNCA- | Modified 36mer | [mUs][mG][fU][mU][fG][mC][mU][ | 1625 |
| 0986 | sense strand | fG][mU][fU][mG][fU][fU][mC][fA | |
| | | ][mG][fA][mA][mG][mA][mG][mC][ | |
| | | mA][mG][mC][mC][mG][ademA-GalN | |
| | | Ac][ademA-GalNAc][ademA-GalNAc | |
| | | ][mG][mG ][mC][mU][mG][mC] | |
| SNCA- | Modified 36mer | [mAs][mG][fA][mU][fU][mU][mU][ | 1626 |
| 1034 | sense strand | fU][mA][fG][mG][fU][fG][mU][fC | |
| | | ][mU][fU][mU][mU][mA][mG][mC][ | |
| | | mA][mG][mC][mC][mG][ademA-GalN | |
| | | Ac][ademA-GalNAc][ademA-GalNAc | |
| | | ][mG][mG][mC][mU][mG][mC] | |
| SNCA- | Modified 36mer | [mGs][mG][fU][mG][fU][mC][mU][ | 1627 |
| 1043 | sense strand | fU][mU][fU][mA][fA][fU][mG][fA | |
| | | ][mU][fA][mC][mU][mA][mG][mC][ | |
| | | mA][mG][mC][mC][mG][ademA-GalN | |
| | | Ac][ademA-GalNAc][ademA-GalNAc | |
| | | ][mG][mG][mC][mU][mG][mC] | |
| SNCA- | Modified 36mer | [mUs][mG][fU][mA][fA][mA][mG][ | 1628 |
| 0230 | sense strand | fG][mA][fA][mU][fU][fC][mA][fU | |
| | | ][mU][fA][mG][mC][mA][mG][mC][ | |
| | | mA][mG][mC][mG][ademA-GalNAc][ | |
| | | ademA-GalNAc][ademA-GalNAc][mG | |
| | | ][mG][mC][mU][mG][mC] | |
| SNCA- | Modified 36mer | [mAs][mU][fG][mG][fA][mU][mG][ | 1629 |
| 0250 | sense strand | fU][mA][fU][mU][fC][fA][mU][fG | |
| | | ][mA][fA][mA][mG][mA][mG][mC][ | |
| | | mA][mG][mC][mC][mG][ademA-GalN | |
| | | Ac][ademA-GalNAc][ademA-GalNAc | |
| | | ][mG][mG][mC][mU][mG][mC] | |
| SNCA- | Modified 36mer | [mAs][mG][fA][mG][fC][mA][mA][ | 1630 |
| 0429 | sense strand | fG][mU][fG][mA][fC][fA][mA][fA | |
| | | ][mU][fG][mU][mU][mA][mG][mC][ | |
| | | mA][mG][mC][mC][mG][ademA-GalN | |
| | | Ac][ademA-GalNAc][ademA-GalNAc | |
| | | ][mG][mG][mC][mU][mG ][mC] | |
| SNCA- | Modified 36mer | [mAs][mG][fG][mG][fU][mA][mU][ | 1631 |
| 0642 | sense strand | fC][mA][fA][mG][fA][fC][mU][fA | |
| | | ][mC][fG][mA][mA][mA][mG][mC][ | |
| | | mA][mG][mC][mC][mG][ademA-GalN | |
| | | Ac][ademA-GalNAc][ademA-GalNAc | |
| | | ][mG][mG][mC][mU][mG][mC] | |
| SNCA- | Modified 36mer | [mAs][mU][fA][mU][fC][mU][mU][ | 1632 |
| 0676 | sense strand | fU][mG][fC][mU][fC][fC][mC][fA | |
| | | ][mG][fU][mU][mU][mA][mG][mC][ | |
| | | mA][mG][mC][mC][mG][ademA-GalN | |
| | | Ac][ademA-GalNAc][ademA-GalNAc | |
| | | ][mG][mG][mC][mU][mG][mC] | |
| SNCA- | Modified 36mer | [mAs][mG][fU][mG][fC][mU][mC][ | 1633 |
| 0730 | sense strand | fA][mG][fU][mU][fC][fC][mA][fA | |
| | | ][mU][fG][mU][mG][mA][mG][mC][ | |
| | | mA][mG][mC][mC][mG][ademA-GalN | |
| | | Ac][ademA-GalNAc][ademA-GalNAc | |
| | | ][mG][mG][mC][mU][mG][mC] | |
| SNCA- | Modified 36mer | [mAs][mG][fU][mC][fA][mU][mG][ | 1634 |
| 0752 | sense strand | fA][mC][fA][mU][fU][fU][mC][fU | |
| | | ][mC][fA][mA][mA][mA][mG][mC][ | |
| | | mA][mG][mC][mC][mG][ademA-GalN | |
| | | Ac][ademA-GalNAc][ademA-GalNAc | |
| | | ][mG][mG][mC][mU][mG ][mC] | |
| SNCA- | Modified 36mer | [mCs][mA][fU][mU][fU][mC][mU][ | 1635 |
| 0760 | sense strand | fC][mA][fA][mA][fG][fU][mU][fU | |
| | | ][mU][fU][mA][mC][mA][mG][mC][ | |
| | | mA][mG][mC][mC][mG][ademA-GalN | |
| | | Ac][ademA-GalNAc][ademA-GalNAc | |
| | | ][mG][mG][mC][mU][mG][mC] | |
| SNCA- | Modified 36mer | [mUs][mC][fA][mG][fC][mA][mG][ | 1636 |
| 0800 | sense strand | fU][mG][fA][mU][fU][fG][mA][fA | |
| | | ][mG][fU][mA][mU][mA][mG][mC][ | |
| | | mA][mG][mC][mC][mG][ademA-GalN | |
| | | Ac][ademA-GalNAc][ademA-GalNAc | |
| | | ][mG][mG][mC][mU][mG][mC] | |
| SNCA- | Modified 36mer | [mGs][mU][fG][mC][fU][mG][mU][ | 1637 |
| 0892 | sense strand | fG][mG][fA][mU][fU][fU][mU][fG | |
| | | ][mU][fG][mG][mC][mA][mG][mC][ | |
| | | mA][mG][mC][mC][mG][ademA-GalN | |
| | | Ac][ademA-GalNAc][ademA-GalNAc | |
| | | ][mG][mG][mC][mU][mG][mC] | |
| SNCA- | Modified 36mer | [mUs][mG][fC][mU][fG][mU][mG][ | 1638 |
| 0893 | sense strand | fG][mA][fU][mU][fU][fU][mG][fU | |
| | | ][mG][fG][mC][mU][mA][mG][mC][ | |
| | | mA][mG][mC][mC][mG][ademA-GalN | |
| | | Ac][ademA-GalNAc][ademA-GalNAc | |
| | | ][mG][mG][mC][mU][mG][mC] | |
| SNCA- | Modified 36mer | [mUs][mG][fU][mU][fC][mA][mG][ | 1639 |
| 0995 | sense strand | fA][mA][fG][mU][fU][fG][mU][fU | |
| | | ][mA][fG][mU][mG][mA][mG][mC][ | |
| | | mA][mG][mC][mC][mG][ademA-GalN | |
| | | Ac][ademA-GalNAc][ademA-GalNAc | |
| | | ][mG][mG][mC][mU][mG][mC] | |
| SNCA- | Modified 36mer | [mAs][mG][fU][mU][fG][mU][mU][ | 1640 |
| 1003 | sense strand | fA][mG][fU][mG][fA][fU][mU][fU | |
| | | ][mG][fC][mU][mA][mA][mG][mC][ | |
| | | mA][mG][mC][mC][mG][ademA-GalN | |
| | | Ac][ademA-GalNAc][ademA-GalNAc | |
| | | ][mG][mG][mC][mU][mG][mC] | |
| SNCA- | Modified 36mer | [mCs][mU][fU][mU][fU][mA][mA][ | 1641 |
| 1048 | sense strand | fU][mG][fA][mU][fA][fC][mU][fG | |
| | | ][mU][fC][mU][mA][mA][mG][mC][ | |
| | | mA][mG][mC][mC][mG][ademA-GalN | |
| | | Ac][ademA-GalNAc][ademA-GalNAc | |
| | | ][mG][mG][mC][mU][mG][mC] | |
| SNCA- | Modified 22mer | [MePhosphonate-4O-mUs][fAs][fA | 1642 |
| 0227 | antisense strand | ][fU][fG][mA][fA][mU][mU][fC][ | |
| | | mC][mU][mU][fU][mA][fC][mA][mC | |
| | | ][fC][mAs][mGs][mG] | |
| SNCA- | Modified 22mer | [MePhosphonate-4O-mUs][fUs][fA | 1643 |
| 0228 | antisense strand | ][fA][fU][mG][fA][mA][mU][fU][ | |
| | | mC][mC][mU][fU][mU][fA][mC][mA | |
| | | ][fC][mCs][mGs][mG] | |
| SNCA- | Modified 22mer | [MePhosphonate-4O-mUs ][fAs][f | 1644 |
| 0242 | antisense strand | A][fU][fA][mC][fA][mU][mC][fC] | |
| | | [mA][mU][mG][fG][mC][fU][mA][m | |
| | | A][fU][mGs][mGs][mG] | |
| SNCA- | Modified 22mer | [MePhosphonate-4O-mUs][fUs][fG | 1645 |
| 0244 | antisense strand | ][fA][fA][mU][fA][mC][mA][fU][ | |
| | | mC][mC][mA][fU][mG][fG][mC][mU | |
| | | ][fA][mAs][mGs][mG] | |
| SNCA- | Modified 22mer | [MePhosphonate-4O-mUs][fUs][fU | 1646 |
| 0248 | antisense strand | ][fC][fA][mU][fG][mA][mA][fU][ | |
| | | mA][mC][mA][fU][mC][fC][mA][mU | |
| | | ][fG][mGs][mGs][mG] | |
| SNCA- | Modified 22mer | [MePhosphonate-4O-mUs][fAs][fG | 1647 |
| 0254 | antisense strand | ][fU][fC][mC][fU][mU][mU][fC][ | |
| | | mA][mU][mG][fA][mA][fU][mA][mC | |
| | | ][fA][mUs][mGs][mG] | |
| SNCA- | Modified 22mer | [MePhosphonate-4O-mUs][fAs][fA | 1648 |
| 0342 | antisense strand | ][fC][fA][mC][fC][mC][mU][fC][ | |
| | | mUs][mGs][mG] | |
| SNCA- | Modified 22mer | [MePhosphonate-4O-mUs][fUs][fA | 1649 |
| 0351 | antisense strand | ][fC][fA][mU][fA][mG][mA][fG][ | |
| | | mA][mA][mC][fA][mC][fC][mC][mU | |
| | | ][fC][mUs][mGs][mG] | |
| SNCA- | Modified 22mer | [MePhosphonate-4O-mUs][fUs][fC | 1650 |
| 0421 | antisense strand | ][fA][fC][mU][fU][mG][mC][fU][ | |
| | | mC][mU][mU][fU][mG][fG][mU][mC | |
| | | ][fU][mUs][mGs][mG] | |
| SNCA- | Modified 22mer | [MePhosphonate-4O-mUs][fAs][fU | 1651 |
| 0426 | antisense strand | ][fU][fU][mG][fU][mC][mA][fC][ | |
| | | mU][mU][mG][fC][mU][fC][mU][mU | |
| | | ][fU][mGs][mGs][mG] | |
| SNCA- | Modified 22mer | [MePhosphonate-4O-mUs][fCs][fC | 1652 |
| 0434 | antisense strand | ][fU][fC][mC][fA][mA][mC][fA][ | |
| | | mU][mU][mU][fG][mU][fC][mA][mC | |
| | | ][fU][mUs][mGs][mG] | |
| SNCA- | Modified 22mer | [MePhosphonate-4O-mUs][fUs][fU | 1653 |
| 0657 | antisense strand | ][fC][fU][mU][fA][mG][mG][fC][ | |
| | | mU][mU][mC][fA][mG][fG][mU][mU | |
| | | ][fC][mGs][mGs][mG] | |
| SNCA- | Modified 22mer | [MePhosphonate-4O-mUs][fAs][fA | 1654 |
| 0675 | antisense strand | ][fC][fU][mG][fG][mG][mA][fG][ | |
| | | mC][mA][mA][fA][mG][fA][mU][mA | |
| | | ][fU][mUs][mGs][mG] | |
| SNCA- | Modified 22mer | [MePhosphonate-4O-mUs][fGs][fA | 1655 |
| 0737 | antisense strand | ][fC][fU][mG][fG][mG][mC][fA][ | |
| | | mC][mA][mU][fU][mG][fG][mA][mA | |
| | | ][fC][mUs][mGs][mG] | |
| SNCA- | Modified 22mer | [MePhosphonate-4O-mUs ][fUs][f | 1656 |
| 0751 | antisense strand | U][fG][fA][mG][fA][mA][mA][fU] | |
| | | [mG][mU][mC][fA][mU][fG][mA][m | |
| | | C][fU][mGs][mGs][mG] | |
| SNCA- | Modified 22mer | [MePhosphonate-4O-mUs][fAs][fA | 1657 |
| 0757 | antisense strand | ][fA][fA][mC][fU][mU][mU][fG][ | |
| | | mA][mG][mA][fA][mA][fU][mG][mU | |
| | | ][fC][mAs][mGs][mG] | |
| SNCA- | Modified 22mer | [MePhosphonate-4O-mUs][fGs][fA | 1658 |
| 0801 | antisense strand | ][fU][fA][mC][fU][mU][mC][fA][ | |
| | | mA][mU][mC][fA][mC][fU][mG][mC | |
| | | ][fU][mGs][mGs][mG] | |
| SNCA- | Modified 22mer | [MePhosphonate-4O-mUs ][fGs][f | 1659 |
| 0291 | antisense strand | Us][fC][fC][mU][fU][mU][mC][fA | |
| | | ][mU][mG][mA][fA][mU][mA][mC][ | |
| | | mA][mU][mCs][mGs][mG] | |
| SNCA- | Modified 22mer | [MePhosphonate-4O-mUs][fCs][fU | 1660 |
| 0986 | antisense strand | ][fU][fC][mU][fG][mA][mA][fC][ | |
| | | mA][mA][mC][fA][mG][fC][mA][mA | |
| | | ][fC][mAs][mGs][mG] | |
| SNCA- | Modified 22mer | [MePhosphonate-4O-mUs][fAs][fA | 1661 |
| 1034 | antisense strand | ][fA][fA][mG][fA][mC][mA][fC][ | |
| | | mC][mU][mA][fA][mA][fA][mA][mU | |
| | | ][fC][mUs][mGs][mG] | |
| SNCA- | Modified 22mer | [MePhosphonate-4O-mUs][fAs][fG | 1662 |
| 1043 | antisense strand | ][fU][fA][mU][fC][mA][mU][fU][ | |
| | | mA][mA][mA][fA][mG][fA][mC][mA | |
| | | ][fC][mCs][mGs][mG] | |
| SNCA- | Modified 22mer | [MePhosphonate-4O-mUs ][fGs][f | 1663 |
| 0230 | antisense strand | C][fU][fA][mA][fU][mG][mA][fC] | |
| | | [mAs][mGs][mG] | |
| SNCA- | Modified 22mer | [MePhosphonate-4O-mUs][fCs][fU | 1664 |
| 0250 | antisense strand | ][fU][fU][mC][fA][mU][mG][fA][ | |
| | | mA][mU][mA][fC][mA][fU][mC][mC | |
| | | ][fA][mUs][mGs][mG] | |
| SNCA- | Modified 22mer | [MePhosphonate-4O-mUs][fAs][fA | 1665 |
| 0429 | antisense strand | ][fC][fA][mU][fU][mU][mG][fU][ | |
| | | mC][mA][mC][fU][mU][fG][mC][mU | |
| | | ][fC][mUs][mGs][mG] | |
| SNCA- | Modified 22mer | [MePhosphonate-4O-mUs][fUs][fU | 1666 |
| 0642 | antisense strand | ][fC][fG][mU][fA][mG][mU][fC][ | |
| | | mU][mU][mG][fA][mU][fA][mC][mC | |
| | | ][fC][mUs][mGs][mG] | |
| SNCA- | Modified 22mer | [MePhosphonate-4O-mUs][fAs][fA | 1667 |
| 0676 | antisense strand | ][fA][fC][mU][fG][mG][mG][fA][ | |
| | | mG][mC][mA][fA][mA][fG][mA][mU | |
| | | ][fA][mUs][mGs][mG] | |
| SNCA- | Modified 22mer | [MePhosphonate-4O-mUs ][fCs][f | 1668 |
| 0730 | antisense strand | A][fC][fA][mU][fU][mG][mG][fA] | |
| | | [mA][mC][mU][fG][mA][fG][mC][m | |
| | | A][fC][mUs][mGs][mG] | |
| SNCA- | Modified 22mer | [MePhosphonate-4O-mUs][fUs][fU | 1669 |
| 0752 | antisense strand | ][fU][fG][mA][fG][mA][mA][fA][ | |
| | | mU][mG][mU][fC][mA][fU][mG][mA | |
| | | ][fC][mUs][mGs][mG] | |
| SNCA- | Modified 22mer | [MePhosphonate-4O-mUs][fGs][fU | 1670 |
| 0760 | antisense strand | ][fA][fA][mA][fA][mA][mC][fU][ | |
| | | mU][mU][mG][fA][mG][fA][mA][mA | |
| | | ][fU][mGs][mGs][mG] | |
| SNCA- | Modified 22mer | [MePhosphonate-4O-mUs ][fAs][f | 1671 |
| 0800 | antisense strand | U][fA][fC][mU][fU][mC][mA][fA] | |
| | | [mU][mC][mA][fC][mU][fG][mC][m | |
| | | U][fG][mAs ][mGs][mG] | |
| SNCA- | Modified 22mer | [MePhosphonate-4O-mUs][fGs][fC | 1672 |
| 0892 | antisense strand | ][fC][fA][mC][fA][mA][mA][fA][ | |
| | | mU][mC][mC][fA][mC][fA][mG][mC | |
| | | ][fA][mCs][mGs][mG] | |
| SNCA- | Modified 22mer | [MePhosphonate-4O-mUs][fAs][fG | 1673 |
| 0893 | antisense strand | ][fC][fC][mA][fC][mA][mA][fA][ | |
| | | mA][mU][mC][fC][mA][fC][mA][mG | |
| | | ][fC][mAs][mGs][mG] | |
| SNCA- | Modified 22mer | [MePhosphonate-4O-mUs ][fCs][f | 1674 |
| 0995 | antisense strand | A][fC][fU][mA][fA][mC][mA][fA] | |
| | | [mC][mU][mU][fC][mU][fG][mA][m | |
| | | A][fC][mAs][mGs][mG] | |
| SNCA- | Modified 22mer | [MePhosphonate-4O-mUs][fUs][fA | 1675 |
| 1003 | antisense strand | ][fG][fC][mA][fA][mA][mU][fC][ | |
| | | mA][mC][mU][fA][mA][fC][mA][mA | |
| | | ][fC][mUs][mGs][mG] | |
| SNCA- | Modified 22 mer | [MePhosphonate-4O-mUs ][fUs][f | 1676 |
| 1048 | antisense strand | A][fG][fA][mC][fA][mG][mU][fA] | |
| | | [mU][mC][mA][fU][mU][fA][mA][m | |
| | | A][fA][mGs][mGs][mG] | |
| Human | NM 000345.3 | AGGAGAAGGAGAAGGAGGAGGACTAGGAGG | 1677 |
| SNCA | | AGGAGGACGGCGACGACCAGAAGGGGCCCA | |
| mRNA | | AGAGAGGGGGCGAGCGACCGAGCGCCGCGA | |
| sequence | | CGCGGAAGTGAGGTGCGTGCGGGCTGCAGC | |
| | | GCAGACCCCGGCCCGGCCCCTCCGAGAGCG | |
| | | TCCTGGGCGCTCCCTCACGCCTTGCCTTCA | |
| | | AGCCTTCTGCCTTTCCACCCTCGTGAGCGG | |
| | | AGAACTGGGAGTGGCCATTCGACGACAGTG | |
| | | TGGTGTAAAGGAATTCATTAGCCATGGATG | |
| | | TATTCATGAAAGGACTTTCAAAGGCCAAGG | |
| | | AGGGAGTTGTGGCTGCTGCTGAGAAAACCA | |
| | | AACAGGGTGTGGCAGAAGCAGCAGGAAAGA | |
| | | CAAAAGAGGGTGTTCTCTATGTAGGCTCCA | |
| | | AAACCAAGGAGGGAGTGGTGCATGGTGTGG | |
| | | CAACAGTGGCTGAGAAGACCAAAGAGCAAG | |
| | | TGACAAATGTTGGAGGAGCAGTGGTGACGG | |
| | | GTGTGACAGCAGTAGCCCAGAAGACAGTGG | |
| | | AGGGAGCAGGGAGCATTGCAGCAGCCACTG | |
| | | GCTTTGTCAAAAAGGACCAGTTGGGCAAGA | |
| | | ATGAAGAAGGAGCCCCACAGGAAGGAATTC | |
| | | TGGAAGATATGCCTGTGGATCCTGACAATG | |
| | | AGGCTTATGAAATGCCTTCTGAGGAAGGGT | |
| | | ATCAAGACTACGAACCTGAAGCCTAAGAAA | |
| | | TATCTTTGCTCCCAGTTTCTTGAGATCTGC | |
| | | TGACAGATGTTCCATCCTGTACAAGTGCTC | |
| | | AGTTCCAATGTGCCCAGTCATGACATTTCT | |
| | | CAAAGTTTTTACAGTGTATCTCGAAGTCTT | |
| | | CCATCAGCAGTGATTGAAGTATCTGTACCT | |
| | | GCCCCCACTCAGCATTTCGGTGCTTCCCTT | |
| | | TCACTGAAGTGAATACATGGTAGCAGGGTC | |
| | | TTTGTGTGCTGTGGATTTTGTGGCTTCAAT | |
| | | CTACGATGTTAAAACAAATTAAAAACACCT | |
| | | AAGTGACTACCACTTATTTCTAAATCCTCA | |
| | | CTATTTTTTTGTTGCTGTTGTTCAGAAGTT | |
| | | GTTAGTGATTTGCTATCATATATTATAAGA | |
| | | TTTTTAGGTGTCTTTTAATGATACTGTCTA | |
| | | AGAATAATGACGTATTGTGAAATTTGTTAA | |
| | | TATATATAATACTTAAAAATATGTGAGCAT | |
| | | GAAACTATGCACCTATAAATACTAAATATG | |
| | | AAATTTTACCATTTTGCGATGTGTTTTATT | |
| | | CACTTGTGTTTGTATATAAATGGTGAGAAT | |
| | | TAAAATAAAACGTTATCTCATTGCAAAAAT | |
| | | ATTTTATTTTTATCCCATCTCACTTTAATA | |
| | | ATAAAAATCATGCTTATAAGCAACATGAAT | |
| | | TAAGAACTGACACAAAGGACAAAAATATAA | |
| | | AGTTATTAATAGCCATTTGAAGAAGGAGGA | |
| | | ATTTTAGAAGAGGTAGAGAAAATGGAACAT | |
| | | TAACCCTACACTCGGAATTCCCTGAAGCAA | |
| | | CACTGCCAGAAGTGTGTTTTGGTATGCACT | |
| | | GGTTCCTTAAGTGGCTGTGATTAATTATTG | |
| | | AAAGTGGGGTGTTGAAGACCCCAACTACTA | |
| | | TTGTAGAGTGGTCTATTTCTCCCTTCAATC | |
| | | CTGTCAATGTTTGCTTTACGTATTTTGGGG | |
| | | AACTGTTGTTTGATGTGTATGTGTTTATAA | |
| | | TTGTTATACATTTTTAATTGAGCCTTTTAT | |
| | | TAACATATATTGTTATTTTTGTCTCGAAAT | |
| | | AATTTTTTAGTTAAAATCTATTTTGTCTGA | |
| | | TATTGGTGTGAATGCTGTACCTTTCTGACA | |
| | | ATAAATAATATTCGACCATGAATAAAAAAA | |
| | | AAAAAAAAGTGGGTTCCCGGGAACTAAGCA | |
| | | GTGTAGAAGATGATTTTGACTACACCCTCC | |
| | | TTAGAGAGCCATAAGACACATTAGCACATA | |
| | | TTAGCACATTCAAGGCTCTGAGAGAATGTG | |
| | | GTTAACTTTGTTTAACTCAGCATTCCTCAC | |
| | | TTTTTTTTTTTAATCATCAGAAATTCTCTC | |
| | | TCTCTCTCTCTCTTTTTCTCTCGCTCTCTT | |
| | | TTTTTTTTTTTTTTTACAGGAAATGCCTTT | |
| | | AAACATCGTTGGAACTACCAGAGTCACCTT | |
| | | AAAGGAGATCAATTCTCTAGACTGATAAAA | |
| | | ATTTCATGGCCTCCTTTAAATGTTGCCAAA | |
| | | TATATGAATTCTAGGATTTTTCCTTAGGAA | |
| | | AGGTTTTTCTCTTTCAGGGAAGATCTATTA | |
| | | ACTCCCCATGGGTGCTGAAAATAAACTTGA | |
| | | TGGTGAAAAACTCTGTATAAATTAATTTAA | |
| | | AAATTATTTGGTTTCTCTTTTTAATTATTC | |
| | | TGGGGCATAGTCATTTCTAAAAGTCACTAG | |
| | | TAGAAAGTATAATTTCAAGACAGAATATTC | |
| | | TAGACATGCTAGCAGTTTATATGTATTCAT | |
| | | GAGTAATGTGATATATATTGGGCGCTGGTG | |
| | | AGGAAGGAAGGAGGAATGAGTGACTATAAG | |
| | | GATGGTTACCATAGAAACTTCCTTTTTTAC | |
| | | CTAATTGAAGAGAGACTACTACAGAGTGCT | |
| | | AAGCTGCATGTGTCATCTTACACTAGAGAG | |
| | | AAATGGTAAGTTTCTTGTTTTATTTAAGTT | |
| | | ATGTTTAAGCAAGGAAAGGATTTGTTATTG | |
| | | AACAGTATATTTCAGGAAGGTTAGAAAGTG | |
| | | GCGGTTAGGATATATTTTAAATCTACCTAA | |
| | | AGCAGCATATTTTAAAAATTTAAAAGTATT | |
| | | GGTATTAAATTAAGAAATAGAGGACAGAAC | |
| | | TAGACTGATAGCAGTGACCTAGAACAATTT | |
| | | GAGATTAGGAAAGTTGTGACCATGAATTTA | |
| | | AGGATTTATGTGGATACAAATTCTCCTTTA | |
| | | AAGTGTTTCTTCCCTTAATATTTATCTGAC | |
| | | GGTAATTTTTGAGCAGTGAATTACTTTATA | |
| | | TATCTTAATAGTTTATTTGGGACCAAACAC | |
| | | TTAAACAAAAAGTTCTTTAAGTCATATAAG | |
| | | CCTTTTCAGGAAGCTTGTCTCATATTCACT | |
| | | CCCGAGACATTCACCTGCCAAGTGGCCTGA | |
| | | GGATCAATCCAGTCCTAGGTTTATTTTGCA | |
| | | GACTTACATTCTCCCAAGTTATTCAGCCTC | |
| | | ATATGACTCCACGGTCGGCTTTACCAAAAC | |
| | | AGTTCAGAGTGCACTTTGGCACACAATTGG | |
| | | GAACAGAACAATCTAATGTGTGGTTTGGTA | |
| | | TTCCAAGTGGGGTCTTTTTCAGAATCTCTG | |
| | | CACTAGTGTGAGATGCAAACATGTTTCCTC | |
| | | ATCTTTCTGGCTTATCCAGTATGTAGCTAT | |
| | | TTGTGACATAATAAATATATACATATATGA | |
| | | AAATA | |
| Mouse | NM_001042451.2 | AGATACCCACAGCCCTCACGCACCGCA | 1678 |
| SNCA | | CCTCCAACCAACCCGTCCCCTCCCTAGG | |
| mRNA | | AAGAGGAGCGAAGGCACGAGGCAGGC | |
| sequence | | GAGGGGGGGGGAGAGGCGCTGACAAA | |
| | | TCAGCTGCGGGGGCGACGTGAAGGAGC | |
| | | CAGGGAGCCAGAGCGCCCGGCAGCAG | |
| | | GCAGCAGACGGCAGGAGACCAGCAGG | |
| | | TGTTCCCCCTGCCCCTGCCTGCCCTTGC | |
| | | CTCTTTCATTGAAATTAGATTGGGGAAA | |
| | | ACAGGAAGAATCGGAGTTCTTCAGAAG | |
| | | CCTAGGGAGCCGTGTGGAGCAAAAATA | |
| | | CATCTTTAGCCATGGATGTGTTCATGAA | |
| | | AGGACTTTCAAAGGCCAAGGAGGGAGT | |
| | | TGTGGCTGCTGCTGAGAAAACCAAGCA | |
| | | GGGTGTGGCAGAGGCAGCTGGAAAGAC | |
| | | AAAAGAGGGAGTCCTCTATGTAGGTTC | |
| | | CAAAACTAAGGAAGGAGTGGTTCATGG | |
| | | AGTGACAACAGTGGCTGAGAAGACCAA | |
| | | AGAGCAAGTGACAAATGTTGGAGGAGC | |
| | | AGTGGTGACTGGTGTGACAGCAGTCGC | |
| | | TCAGAAGACAGTGGAGGGAGCTGGGA | |
| | | ATATAGCTGCTGCCACTGGCTTTGTCAA | |
| | | GAAGGACCAGATGGGCAAGGGTGAGG | |
| | | AGGGGTACCCACAGGAAGGAATCCTGG | |
| | | AAGACATGCCTGTGGATCCTGGCAGTG | |
| | | AGGCTTATGAAATGCCTTCAGAGGAAG | |
| | | GCTACCAAGACTATGAGCCTGAAGCCT | |
| | | AAGAATGTCATTGCACCCAATCTCCTA | |
| | | AGATCTGCCGGCTGCTCTTCCATGGCGT | |
| | | ACAAGTGCTCAGTTCCAATGTGCCCAG | |
| | | TCATGACCTTTTCTCAAAGCTGTACAGT | |
| | | GTGTTTCAAAGTCTTCCATCAGCAGTGA | |
| | | TCGGCGTCCTGTACCTGCCCCTCAGCAT | |
| | | CCCGGTGCTCCCCTCTCACTACAGTGAA | |
| | | AACCTGGTAGCAGGGTCTTGTGTGCTGT | |
| | | GGATATTGTTGTGGCTTCACACTTAAAT | |
| | | TGTTAGAAGAAACTTAAAACACCTAAG | |
| | | TGACTACCACTTATTTCTAAATCTTCAT | |
| | | CGTTTTCTTTTTGTTGCTGTTCTTAAGAA | |
| | | GTTGTGATTTGCTCCAAGAGTTTTAGGT | |
| | | GTCCTGAATGACTCTTTCTGTCTAAGAA | |
| | | TGATGTGTTGTGAAATTTGTTAATATAT | |
| | | ATTTTAAAATTATGTGAGCATGAGACT | |
| | | ATGCACCTATAAATATTAATTTATGAAT | |
| | | TTTACAGTTTTGTGATGTGTTTTATTAA | |
| | | CTTGTGTTTGTATATAAATGGTGGAAAA | |
| | | TAAAATAAAATATTATCCATTGCAAAA | |
| | | TCAAAAAAAAAAAAAAAAAA | |
| Monkey | XM 005555420.2 | CCTTGCGCGGCCAGGCAGGCGGCTGGA | 1679 |
| SNCA | | ATTGGTGGTTCACCCTGCGCCCCCTGCC | |
| mRNA | | CCATCCCCATCCGAGATAGGGAACGAA | |
| sequence | | GAGCACGCTGCAGGGAAAGCAGCGAG | |
| | | CGCTGGGAGGGGAGCGTGGAGAGGCG | |
| | | CTGACAAATCAGCGGTGGGGGCGGAGA | |
| | | GCCGAGGAGAAGGAGAAGGAGGAGGA | |
| | | CGAGGAGGAGGAGGACGGCGACGACC | |
| | | AGAAGGGGCCCGAGAGAGGGGGCGAG | |
| | | CGACCGAGCGCCGCGACGCGGGAGTGA | |
| | | GGTGCGTGCGGGCTGCAGCGCAGACCC | |
| | | CGGCCCGGCCCCTCCGAGAGCGTCCTG | |
| | | AGCGCTCCCTCACGCCTTCCCTTCAAAC | |
| | | CTTCTGCCTTTTTCTCCATCCTCGTGAG | |
| | | CGGAGAACTGGGAGTGGCCATTCGACG | |
| | | ACAGTGTGGTGTAAAGGAATTCATTAG | |
| | | CCATGGATGTATTCATGAAAGGACTTTC | |
| | | AAAGGCCAAGGAGGGAGTTGTGGCTGC | |
| | | TGCTGAGAAAACCAAACAGGGTGTGGC | |
| | | AGAAGCAGCAGGAAAGACAAAAGAGG | |
| | | GTGTTCTCTATGTAGGCTCCAAAACCAA | |
| | | GGAGGGAGTGGTGCACGGTGTGGCAAC | |
| | | AGTGGCTGAGAAGACCAAAGAGCAAGT | |
| | | GACAAATGTTGGAGGAGCGGTGGTGAC | |
| | | GGGTGTGACAGCAGTAGCCCAGAAGAC | |
| | | AGTGGAGGGAGCAGGGAGCATTGCAGC | |
| | | AGCCACTGGCTTCATCAAAAAGGACCA | |
| | | GTTGGGCAAGAATGAAGAAGGAGCCCC | |
| | | ACAGGAAGGAATTCTACAAGATATGCC | |
| | | TGTGGATCCTGACAATGAGGCTTATGA | |
| | | AATGCCTTCTGAGGAAGGGTATCAAGA | |
| | | CTACGAACCTGAAGCCTAAGAAATATC | |
| | | TTTGCTCCCAGTTTCTTGAGATCTGCTG | |
| | | ACAGACGTTCCATCTTGTACAAGTGCTC | |
| | | AGTTCCAATGTGCCCAGTCATGACATTT | |
| | | CTCAAAGTTTTTACAGTATATTTTGAAG | |
| | | TCTTCCATCAGCAGTGATTGAAGTATCT | |
| | | GTACCTGCCCCCATTCAGCATTTCGGTG | |
| | | CTTCCCTTTCACTGAAGTGAATACATGG | |
| | | TAGCAGGGTCTTTGTGTGCTGTGGATTT | |
| | | TGTGGCTTCAATCTATGATGTTAAAACA | |
| | | ATTTAAAAACACCTAAGTGACTACCAC | |
| | | TTATTTCTAAATCCTCACTATTTTTTTGT | |
| | | TGCTGTTGTTCAGAAGTTGTTAGTGATT | |
| | | TGCTATCGTATATTATAAGATTTTTAGG | |
| | | TGTCTTTTAATGATACTGTCTAAGAATA | |
| | | ATGATGTATTGTGAAATTTGTTAATATA | |
| | | TATAATACTTAAAAGTATGTGAGCATG | |
| | | AAACTATGCACCTATAAATACTAACTA | |
| | | TGAAATTTTACCGTTTTGTGATGTGTTT | |
| | | TATTAACTTGTGTTTGTATATAAATGGT | |
| | | GAGAATTAAAATAAAATGTCGTCTCAT | |
| | | TGCAAACAAAAATTTATTTTTATCCCAT | |
| | | CTCACTTTAATAATAAAAATCTTGCTTA | |
| | | TAAGCAACATGCATTGAGAACTGACAC | |
| | | AATGGACATAAAGTTATTAATAGGCAT | |
| | | TTGAAGAAGGAGGAATTTTAGAAGAGG | |
| | | TAGAGAAAATGGAACATTAACCCTACA | |
| | | CTGGGAATTCCCTGAAGCAGCACTGCC | |
| | | AGAAGTGTGTTTTGTGGTGCCTTAAGTG | |
| | | GCTGTGATAAAAAAAAAAAAAAGTGG | |
| | | GCTCCAGGGAACGAAGCAGTGTAAAAG | |
| | | ATGATTTTGACTACATCCTCCTTAGAGA | |
| | | TCCATGAGACACTTTAGCACATATTAGC | |
| | | ACATTCAAGGCTCTGAGACAATGTGGT | |
| | | TAACTTAGTTTAACTCAGCAGTCCCCAC | |
| | | TAAAAAAAAAAAAATCATCAAAAATTC | |
| | | TCTCTCTCTATTCCTTTTTCTCTCGCTCC | |
| | | CCTTTTTTCCAGGAAATGCCTTTAAACA | |
| | | CCTTTGGGAACTATCAGGATCACCTTAA | |
| | | AGAAGATCAGTTCTCCAGACTGATAAA | |
| | | AATTTCATGATCTCTTTTAAATGTTGCC | |
| | | AAATATATGAATTCTAGGATTTTTCCTT | |
| | | GGGAAAGGTTTTTCTCTTTCAGGGAAG | |
| | | ATCTATTAACTCCCCATGGGTGCTGAAA | |
| | | ATAAACTTGATGGTGAAAAATTCTATA | |
| | | TAAATTAATTTAAAATTTTTTTGGTTTC | |
| | | TCTTTTTAATTATTCTGGGGCATAGTCA | |
| | | TTTTTAAAAGTCACTAGTAGAAAGTAT | |
| | | AATTTCAAGACAGAATATTCTAGACAT | |
| | | GCTAGCAGTTTATATGTATTCATGAGTA | |
| | | ATGTGATATATATTGGGCACTGGTGAG | |
| | | GCAGGAAGGAGGAATGAGTGACTATAA | |
| | | GGATGGTTACCATAGAAACTTCCTTTTT | |
| | | TACCTAATTGAAAAGCGACTACTACAG | |
| | | AGTGCTAAGCTGCATGTGTCATCTTACA | |
| | | CTGGAGAGAAATGGTAAGTTTCTTGTTT | |
| | | TATTTAAGTTATGTTTAAGCAAGGAAA | |
| | | GGATTTTTTATTGAACAGTATATTTCAG | |
| | | GAAGGTTAGAAAATAGCTGTTAGGATA | |
| | | TATTTTAAATCTACCTAAAGCAGCATAT | |
| | | TTTAAAAAATTAGAAGTATTGGCATTA | |
| | | AATGAAGAAATAGAGGACAAAACTAG | |
| | | ACTGACAGCAATGACCCAGAACATTTT | |
| | | GAGATTAGTAAAGTTGTGACCATGAAT | |
| | | TTAGGGATTTATGTGGATACAAATTCTC | |
| | | CTTTAAAGTGTTTCTTCCCTTAATATTT | |
| | | ATCTGGTAGTTATTTATGAGCAGTGAAT | |
| | | TATTTTGTAGTTTATATATCTTAATAGT | |
| | | TTATTTGGGACCAAGCACTTAACAAAA | |
| | | AGTTCTATAAGTCATAGAAGCCTTTTCA | |
| | | GGAAGCTTGTCTCACATTCATTCCTGAG | |
| | | ACTTTCACCTGCCAAGTGGCCTGAGGA | |
| | | TCAATCCGGTCCTAGGTTTATTTTGCAG | |
| | | ACATACATTCTCCCAAGTTATTCAGCCT | |
| | | CATATGACTCCACAGTGGGCTTTACCA | |
| | | AAACAGTTCAGAGTGCACTTTGGCACA | |
| | | CAATTGGGAGCAGAACAATCTAATGTG | |
| | | TGGTTTGGTATTCCAAGTGGGGTCTTTT | |
| | | TCAGAATCTCTCCACTAGTGTGAGATGC | |
| | | AAATATGTTTCCTCATTTTTCTGGCTCA | |
| | | TCCAGTATGTAGCTTTTTGTGACATAAT | |
| | | AAATATATACATATATGAAAATA | |
| Stem-Loop | | GCAGCCGAAAGGCUGC | 1680 |
| SNCA- | 20mer sense strand | CAGUCAUGACAUUUCUCAAA | 1681 |
| 0751 | | | |
| SNCA- | Modified 20mer | [ademCs-C₁₆][mA][fG][mU][fC][m | 1682 |
| 0751 | sense strand | A][mU][fG][mA][fC][mA][fU][fU] | |
| | | [mU][fC][mU][fC][mAs][mAs][mA] | |
| SNCA-259 | 19mer Sense Strand | UUCAUGAAAGGACUUUCAA | 1683 |
| SNCA-260 | 19mer Sense Strand | UCAUGAAAGGACUUUCAAA | 1684 |
| SNCA-261 | 19mer Sense Strand | CAUGAAAGGACUUUCAAAG | 1685 |
| SNCA-262 | 19mer Sense Strand | AUGAAAGGACUUUCAAAGG | 1686 |
| SNCA-263 | 19mer Sense Strand | UGAAAGGACUUUCAAAGGC | 1687 |
| SNCA-264 | 19mer Sense Strand | GAAAGGACUUUCAAAGGCC | 1688 |
| SNCA-285 | 19mer Sense Strand | GGAGGGAGUUGUGGCUGCU | 1689 |
| SNCA-288 | 19mer Sense Strand | GGGAGUUGUGGCUGCUGCU | 1690 |
| SNCA-289 | 19mer Sense Strand | GGAGUUGUGGCUGCUGCUG | 1691 |
| SNCA-290 | 19mer Sense Strand | GAGUUGUGGCUGCUGCUGA | 1692 |
| SNCA-292 | 19mer Sense Strand | GUUGUGGCUGCUGCUGAGA | 1693 |
| SNCA-293 | 19mer Sense Strand | UUGUGGCUGCUGCUGAGAA | 1694 |
| SNCA-294 | 19mer Sense Strand | UGUGGCUGCUGCUGAGAAA | 1695 |
| SNCA-295 | 19mer Sense Strand | GUGGCUGCUGCUGAGAAAA | 1696 |
| SNCA-296 | 19mer Sense Strand | UGGCUGCUGCUGAGAAAAC | 1697 |
| SNCA-297 | 19mer Sense Strand | GGCUGCUGCUGAGAAAACC | 1698 |
| SNCA-407 | 19mer Sense Strand | CAACAGUGGCUGAGAAGAC | 1699 |
| SNCA-408 | 19mer Sense Strand | AACAGUGGCUGAGAAGACC | 1700 |
| SNCA-409 | 19mer Sense Strand | ACAGUGGCUGAGAAGACCA | 1701 |
| SNCA-410 | 19mer Sense Strand | CAGUGGCUGAGAAGACCAA | 1702 |
| SNCA-411 | 19mer Sense Strand | AGUGGCUGAGAAGACCAAA | 1703 |
| SNCA-412 | 19mer Sense Strand | GUGGCUGAGAAGACCAAAG | 1704 |
| SNCA-413 | 19mer Sense Strand | UGGCUGAGAAGACCAAAGA | 1705 |
| SNCA-414 | 19mer Sense Strand | GGCUGAGAAGACCAAAGAG | 1706 |
| SNCA-415 | 19mer Sense Strand | GCUGAGAAGACCAAAGAGC | 1707 |
| SNCA-416 | 19mer Sense Strand | CUGAGAAGACCAAAGAGCA | 1708 |
| SNCA-417 | 19mer Sense Strand | UGAGAAGACCAAAGAGCAA | 1709 |
| SNCA-418 | 19mer Sense Strand | GAGAAGACCAAAGAGCAAG | 1710 |
| SNCA-419 | 19mer Sense Strand | AGAAGACCAAAGAGCAAGU | 1711 |
| SNCA-420 | 19mer Sense Strand | GAAGACCAAAGAGCAAGUG | 1712 |
| SNCA-421 | 19mer Sense Strand | AAGACCAAAGAGCAAGUGA | 1713 |
| SNCA-422 | 19mer Sense Strand | AGACCAAAGAGCAAGUGAC | 1714 |
| SNCA-423 | 19mer Sense Strand | GACCAAAGAGCAAGUGACA | 1715 |
| SNCA-424 | 19mer Sense Strand | ACCAAAGAGCAAGUGACAA | 1716 |
| SNCA-425 | 19mer Sense Strand | CCAAAGAGCAAGUGACAAA | 1717 |
| SNCA-426 | 19mer Sense Strand | CAAAGAGCAAGUGACAAAU | 1718 |
| SNCA-427 | 19mer Sense Strand | AAAGAGCAAGUGACAAAUG | 1719 |
| SNCA-428 | 19mer Sense Strand | AAGAGCAAGUGACAAAUGU | 1720 |
| SNCA-429 | 19mer Sense Strand | AGAGCAAGUGACAAAUGUU | 1721 |
| SNCA-430 | 19mer Sense Strand | GAGCAAGUGACAAAUGUUG | 1722 |
| SNCA-431 | 19mer Sense Strand | AGCAAGUGACAAAUGUUGG | 1723 |
| SNCA-432 | 19mer Sense Strand | GCAAGUGACAAAUGUUGGA | 1724 |
| SNCA-433 | 19mer Sense Strand | CAAGUGACAAAUGUUGGAG | 1725 |
| SNCA-434 | 19mer Sense Strand | AAGUGACAAAUGUUGGAGG | 1726 |
| SNCA-435 | 19mer Sense Strand | AGUGACAAAUGUUGGAGGA | 1727 |
| SNCA-436 | 19mer Sense Strand | GUGACAAAUGUUGGAGGAG | 1728 |
| SNCA-437 | 19mer Sense Strand | UGACAAAUGUUGGAGGAGC | 1729 |
| SNCA-725 | 19mer Sense Strand | GUACAAGUGCUCAGUUCCA | 1730 |
| SNCA-726 | 19mer Sense Strand | UACAAGUGCUCAGUUCCAA | 1731 |
| SNCA-727 | 19mer Sense Strand | ACAAGUGCUCAGUUCCAAU | 1732 |
| SNCA-728 | 19mer Sense Strand | CAAGUGCUCAGUUCCAAUG | 1733 |
| SNCA-729 | 19mer Sense Strand | AAGUGCUCAGUUCCAAUGU | 1734 |
| SNCA-730 | 19mer Sense Strand | AGUGCUCAGUUCCAAUGUG | 1735 |
| SNCA-731 | 19mer Sense Strand | GUGCUCAGUUCCAAUGUGC | 1736 |
| SNCA-732 | 19mer Sense Strand | UGCUCAGUUCCAAUGUGCC | 1737 |
| SNCA-733 | 19mer Sense Strand | GCUCAGUUCCAAUGUGCCC | 1738 |
| SNCA-734 | 19mer Sense Strand | CUCAGUUCCAAUGUGCCCA | 1739 |
| SNCA-735 | 19mer Sense Strand | UCAGUUCCAAUGUGCCCAG | 1740 |
| SNCA-736 | 19mer Sense Strand | CAGUUCCAAUGUGCCCAGU | 1741 |
| SNCA-737 | 19mer Sense Strand | AGUUCCAAUGUGCCCAGUC | 1742 |
| SNCA-738 | 19mer Sense Strand | GUUCCAAUGUGCCCAGUCA | 1743 |
| SNCA-739 | 19mer Sense Strand | UUCCAAUGUGCCCAGUCAU | 1744 |
| SNCA-740 | 19mer Sense Strand | UCCAAUGUGCCCAGUCAUG | 1745 |
| SNCA-741 | 19mer Sense Strand | CCAAUGUGCCCAGUCAUGA | 1746 |
| SNCA-742 | 19mer Sense Strand | CAAUGUGCCCAGUCAUGAC | 1747 |
| SNCA-790 | 19mer Sense Strand | AAGUCUUCCAUCAGCAGUG | 1748 |
| SNCA-791 | 19mer Sense Strand | AGUCUUCCAUCAGCAGUGA | 1749 |
| SNCA-792 | 19mer Sense Strand | GUCUUCCAUCAGCAGUGAU | 1750 |
| SNCA-938 | 19mer Sense Strand | AAAACACCUAAGUGACUAC | 1751 |
| SNCA-939 | 19mer Sense Strand | AAACACCUAAGUGACUACC | 1752 |
| SNCA-940 | 19mer Sense Strand | AACACCUAAGUGACUACCA | 1753 |
| SNCA-941 | 19mer Sense Strand | ACACCUAAGUGACUACCAC | 1754 |
| SNCA-942 | 19mer Sense Strand | CACCUAAGUGACUACCACU | 1755 |
| SNCA-943 | 19mer Sense Strand | ACCUAAGUGACUACCACUU | 1756 |
| SNCA-944 | 19mer Sense Strand | CCUAAGUGACUACCACUUA | 1757 |
| SNCA-945 | 19mer Sense Strand | CUAAGUGACUACCACUUAU | 1758 |
| SNCA-946 | 19mer Sense Strand | UAAGUGACUACCACUUAUU | 1759 |
| SNCA-947 | 19mer Sense Strand | AAGUGACUACCACUUAUUU | 1760 |
| SNCA-948 | 19mer Sense Strand | AGUGACUACCACUUAUUUC | 1761 |
| SNCA-949 | 19mer Sense Strand | GUGACUACCACUUAUUUCU | 1762 |
| SNCA-950 | 19mer Sense Strand | UGACUACCACUUAUUUCUA | 1763 |
| SNCA-951 | 19mer Sense Strand | GACUACCACUUAUUUCUAA | 1764 |
| SNCA-952 | 19mer Sense Strand | ACUACCACUUAUUUCUAAA | 1765 |
| SNCA-953 | 19mer Sense Strand | CUACCACUUAUUUCUAAAU | 1766 |
| SNCA-954 | 19mer Sense Strand | UACCACUUAUUUCUAAAUC | 1767 |
| SNCA- | 19mer Sense Strand | UUGUGAAAUUUGUUAAUAU | 1768 |
| 1081 | | | |
| SNCA- | 19mer Sense Strand | UGUGAAAUUUGUUAAUAUA | 1769 |
| 1082 | | | |
| SNCA- | 19mer Sense Strand | GUGAAAUUUGUUAAUAUAU | 1770 |
| 1083 | | | |
| SNCA- | 19mer Sense Strand | UGAAAUUUGUUAAUAUAUA | 1771 |
| 1084 | | | |
| SNCA- | 19mer Sense Strand | GAAAUUUGUUAAUAUAUAU | 1772 |
| 1085 | | | |
| SNCA- | 19mer Sense Strand | ACUUGUGUUUGUAUAUAAA | 1773 |
| 1188 | | | |
| SNCA- | 19mer Sense Strand | CUUGUGUUUGUAUAUAAAU | 1774 |
| 1189 | | | |
| SNCA- | 19mer Sense Strand | UUGUGUUUGUAUAUAAAUG | 1775 |
| 1190 | | | |
| SNCA- | 19mer Sense Strand | UGUGUUUGUAUAUAAAUGG | 1776 |
| 1191 | | | |
| SNCA- | 19mer Sense Strand | GUGUUUGUAUAUAAAUGGU | 1777 |
| 1192 | | | |
| SNCA- | 19mer Sense Strand | UGUUUGUAUAUAAAUGGUG | 1778 |
| 1193 | | | |
| SNCA-225 | 19mer Sense Strand | UGUGGUGUAAAGGAAUUCA | 1779 |
| SNCA-226 | 19mer Sense Strand | GUGGUGUAAAGGAAUUCAU | 1780 |
| SNCA-227 | 19mer Sense Strand | UGGUGUAAAGGAAUUCAUU | 1781 |
| SNCA-228 | 19mer Sense Strand | GGUGUAAAGGAAUUCAUUA | 1782 |
| SNCA-229 | 19mer Sense Strand | GUGUAAAGGAAUUCAUUAG | 1783 |
| SNCA-230 | 19mer Sense Strand | UGUAAAGGAAUUCAUUAGC | 1784 |
| SNCA-231 | 19mer Sense Strand | GUAAAGGAAUUCAUUAGCC | 1785 |
| SNCA-232 | 19mer Sense Strand | UAAAGGAAUUCAUUAGCCA | 1786 |
| SNCA-233 | 19mer Sense Strand | AAAGGAAUUCAUUAGCCAU | 1787 |
| SNCA-234 | 19mer Sense Strand | AAGGAAUUCAUUAGCCAUG | 1788 |
| SNCA-235 | 19mer Sense Strand | AGGAAUUCAUUAGCCAUGG | 1789 |
| SNCA-236 | 19mer Sense Strand | GGAAUUCAUUAGCCAUGGA | 1790 |
| SNCA-237 | 19mer Sense Strand | GAAUUCAUUAGCCAUGGAU | 1791 |
| SNCA-238 | 19mer Sense Strand | AAUUCAUUAGCCAUGGAUG | 1792 |
| SNCA-239 | 19mer Sense Strand | AUUCAUUAGCCAUGGAUGU | 1793 |
| SNCA-240 | 19mer Sense Strand | UUCAUUAGCCAUGGAUGUA | 1794 |
| SNCA-241 | 19mer Sense Strand | UCAUUAGCCAUGGAUGUAU | 1795 |
| SNCA-242 | 19mer Sense Strand | CAUUAGCCAUGGAUGUAUU | 1796 |
| SNCA-243 | 19mer Sense Strand | AUUAGCCAUGGAUGUAUUC | 1797 |
| SNCA-244 | 19mer Sense Strand | UUAGCCAUGGAUGUAUUCA | 1798 |
| SNCA-245 | 19mer Sense Strand | UAGCCAUGGAUGUAUUCAU | 1799 |
| SNCA-246 | 19mer Sense Strand | AGCCAUGGAUGUAUUCAUG | 1800 |
| SNCA-247 | 19mer Sense Strand | GCCAUGGAUGUAUUCAUGA | 1801 |
| SNCA-248 | 19mer Sense Strand | CCAUGGAUGUAUUCAUGAA | 1802 |
| SNCA-249 | 19mer Sense Strand | CAUGGAUGUAUUCAUGAAA | 1803 |
| SNCA-250 | 19mer Sense Strand | AUGGAUGUAUUCAUGAAAG | 1804 |
| SNCA-251 | 19mer Sense Strand | UGGAUGUAUUCAUGAAAGG | 1805 |
| SNCA-252 | 19mer Sense Strand | GGAUGUAUUCAUGAAAGGA | 1806 |
| SNCA-253 | 19mer Sense Strand | GAUGUAUUCAUGAAAGGAC | 1807 |
| SNCA-254 | 19mer Sense Strand | AUGUAUUCAUGAAAGGACU | 1808 |
| SNCA-256 | 19mer Sense Strand | GUAUUCAUGAAAGGACUUU | 1809 |
| SNCA-330 | 19mer Sense Strand | AGAAGCAGCAGGAAAGACA | 1810 |
| SNCA-335 | 19mer Sense Strand | CAGCAGGAAAGACAAAAGA | 1811 |
| SNCA-337 | 19mer Sense Strand | GCAGGAAAGACAAAAGAGG | 1812 |
| SNCA-341 | 19mer Sense Strand | GAAAGACAAAAGAGGGUGU | 1813 |
| SNCA-342 | 19mer Sense Strand | AAAGACAAAAGAGGGUGUU | 1814 |
| SNCA-344 | 19mer Sense Strand | AGACAAAAGAGGGUGUUCU | 1815 |
| SNCA-345 | 19mer Sense Strand | GACAAAAGAGGGUGUUCUC | 1816 |
| SNCA-351 | 19mer Sense Strand | AGAGGGUGUUCUCUAUGUA | 1817 |
| SNCA-353 | 19mer Sense Strand | AGGGUGUUCUCUAUGUAGG | 1818 |
| SNCA-355 | 19mer Sense Strand | GGUGUUCUCUAUGUAGGCU | 1819 |
| SNCA-638 | 19mer Sense Strand | AGGAAGGGUAUCAAGACUA | 1820 |
| SNCA-641 | 19mer Sense Strand | AAGGGUAUCAAGACUACGA | 1821 |
| SNCA-642 | 19mer Sense Strand | AGGGUAUCAAGACUACGAA | 1822 |
| SNCA-647 | 19mer Sense Strand | AUCAAGACUACGAACCUGA | 1823 |
| SNCA-648 | 19mer Sense Strand | UCAAGACUACGAACCUGAA | 1824 |
| SNCA-650 | 19mer Sense Strand | AAGACUACGAACCUGAAGC | 1825 |
| SNCA-652 | 19mer Sense Strand | GACUACGAACCUGAAGCCU | 1826 |
| SNCA-653 | 19mer Sense Strand | ACUACGAACCUGAAGCCUA | 1827 |
| SNCA-654 | 19mer Sense Strand | CUACGAACCUGAAGCCUAA | 1828 |
| SNCA-656 | 19mer Sense Strand | ACGAACCUGAAGCCUAAGA | 1829 |
| SNCA-657 | 19mer Sense Strand | CGAACCUGAAGCCUAAGAA | 1830 |
| SNCA-659 | 19mer Sense Strand | AACCUGAAGCCUAAGAAAU | 1831 |
| SNCA-660 | 19mer Sense Strand | ACCUGAAGCCUAAGAAAUA | 1832 |
| SNCA-661 | 19mer Sense Strand | CCUGAAGCCUAAGAAAUAU | 1833 |
| SNCA-662 | 19mer Sense Strand | CUGAAGCCUAAGAAAUAUC | 1834 |
| SNCA-663 | 19mer Sense Strand | UGAAGCCUAAGAAAUAUCU | 1835 |
| SNCA-668 | 19mer Sense Strand | CCUAAGAAAUAUCUUUGCU | 1836 |
| SNCA-669 | 19mer Sense Strand | CUAAGAAAUAUCUUUGCUC | 1837 |
| SNCA-672 | 19mer Sense Strand | AGAAAUAUCUUUGCUCCCA | 1838 |
| SNCA-675 | 19mer Sense Strand | AAUAUCUUUGCUCCCAGUU | 1839 |
| SNCA-676 | 19mer Sense Strand | AUAUCUUUGCUCCCAGUUU | 1840 |
| SNCA-689 | 19mer Sense Strand | CAGUUUCUUGAGAUCUGCU | 1841 |
| SNCA-724 | 19mer Sense Strand | UGUACAAGUGCUCAGUUCC | 1842 |
| SNCA-744 | 19mer Sense Strand | AUGUGCCCAGUCAUGACAU | 1843 |
| SNCA-745 | 19mer Sense Strand | UGUGCCCAGUCAUGACAUU | 1844 |
| SNCA-746 | 19mer Sense Strand | GUGCCCAGUCAUGACAUUU | 1845 |
| SNCA-751 | 19mer Sense Strand | CAGUCAUGACAUUUCUCAA | 1846 |
| SNCA-752 | 19mer Sense Strand | AGUCAUGACAUUUCUCAAA | 1847 |
| SNCA-753 | 19mer Sense Strand | GUCAUGACAUUUCUCAAAG | 1848 |
| SNCA-754 | 19mer Sense Strand | UCAUGACAUUUCUCAAAGU | 1849 |
| SNCA-755 | 19mer Sense Strand | CAUGACAUUUCUCAAAGUU | 1850 |
| SNCA-756 | 19mer Sense Strand | AUGACAUUUCUCAAAGUUU | 1851 |
| SNCA-757 | 19mer Sense Strand | UGACAUUUCUCAAAGUUUU | 1852 |
| SNCA-758 | 19mer Sense Strand | GACAUUUCUCAAAGUUUUU | 1853 |
| SNCA-759 | 19mer Sense Strand | ACAUUUCUCAAAGUUUUUA | 1854 |
| SNCA-760 | 19mer Sense Strand | CAUUUCUCAAAGUUUUUAC | 1855 |
| SNCA-761 | 19mer Sense Strand | AUUUCUCAAAGUUUUUACA | 1856 |
| SNCA-762 | 19mer Sense Strand | UUUCUCAAAGUUUUUACAG | 1857 |
| SNCA-789 | 19mer Sense Strand | GAAGUCUUCCAUCAGCAGU | 1858 |
| SNCA-795 | 19mer Sense Strand | UUCCAUCAGCAGUGAUUGA | 1859 |
| SNCA-796 | 19mer Sense Strand | UCCAUCAGCAGUGAUUGAA | 1860 |
| SNCA-797 | 19mer Sense Strand | CCAUCAGCAGUGAUUGAAG | 1861 |
| SNCA-798 | 19mer Sense Strand | CAUCAGCAGUGAUUGAAGU | 1862 |
| SNCA-799 | 19mer Sense Strand | AUCAGCAGUGAUUGAAGUA | 1863 |
| SNCA-800 | 19mer Sense Strand | UCAGCAGUGAUUGAAGUAU | 1864 |
| SNCA-801 | 19mer Sense Strand | CAGCAGUGAUUGAAGUAUC | 1865 |
| SNCA-802 | 19mer Sense Strand | AGCAGUGAUUGAAGUAUCU | 1866 |
| SNCA-803 | 19mer Sense Strand | GCAGUGAUUGAAGUAUCUG | 1867 |
| SNCA-804 | 19mer Sense Strand | CAGUGAUUGAAGUAUCUGU | 1868 |
| SNCA-805 | 19mer Sense Strand | AGUGAUUGAAGUAUCUGUA | 1869 |
| SNCA-809 | 19mer Sense Strand | AUUGAAGUAUCUGUACCUG | 1870 |
| SNCA-839 | 19mer Sense Strand | CAUUUCGGUGCUUCCCUUU | 1871 |
| SNCA-844 | 19mer Sense Strand | CGGUGCUUCCCUUUCACUG | 1872 |
| SNCA-845 | 19mer Sense Strand | GGUGCUUCCCUUUCACUGA | 1873 |
| SNCA-846 | 19mer Sense Strand | GUGCUUCCCUUUCACUGAA | 1874 |
| SNCA-847 | 19mer Sense Strand | UGCUUCCCUUUCACUGAAG | 1875 |
| SNCA-848 | 19mer Sense Strand | GCUUCCCUUUCACUGAAGU | 1876 |
| SNCA-849 | 19mer Sense Strand | CUUCCCUUUCACUGAAGUG | 1877 |
| SNCA-850 | 19mer Sense Strand | UUCCCUUUCACUGAAGUGA | 1878 |
| SNCA-851 | 19mer Sense Strand | UCCCUUUCACUGAAGUGAA | 1879 |
| SNCA-852 | 19mer Sense Strand | CCCUUUCACUGAAGUGAAU | 1880 |
| SNCA-853 | 19mer Sense Strand | CCUUUCACUGAAGUGAAUA | 1881 |
| SNCA-854 | 19mer Sense Strand | CUUUCACUGAAGUGAAUAC | 1882 |
| SNCA-855 | 19mer Sense Strand | UUUCACUGAAGUGAAUACA | 1883 |
| SNCA-856 | 19mer Sense Strand | UUCACUGAAGUGAAUACAU | 1884 |
| SNCA-857 | 19mer Sense Strand | UCACUGAAGUGAAUACAUG | 1885 |
| SNCA-858 | 19mer Sense Strand | CACUGAAGUGAAUACAUGG | 1886 |
| SNCA-859 | 19mer Sense Strand | ACUGAAGUGAAUACAUGGU | 1887 |
| SNCA-860 | 19mer Sense Strand | CUGAAGUGAAUACAUGGUA | 1888 |
| SNCA-861 | 19mer Sense Strand | UGAAGUGAAUACAUGGUAG | 1889 |
| SNCA-863 | 19mer Sense Strand | AAGUGAAUACAUGGUAGCA | 1890 |
| SNCA-864 | 19mer Sense Strand | AGUGAAUACAUGGUAGCAG | 1891 |
| SNCA-865 | 19mer Sense Strand | GUGAAUACAUGGUAGCAGG | 1892 |
| SNCA-867 | 19mer Sense Strand | GAAUACAUGGUAGCAGGGU | 1893 |
| SNCA-868 | 19mer Sense Strand | AAUACAUGGUAGCAGGGUC | 1894 |
| SNCA-875 | 19mer Sense Strand | GGUAGCAGGGUCUUUGUGU | 1895 |
| SNCA-881 | 19mer Sense Strand | AGGGUCUUUGUGUGCUGUG | 1896 |
| SNCA-883 | 19mer Sense Strand | GGUCUUUGUGUGCUGUGGA | 1897 |
| SNCA-889 | 19mer Sense Strand | UGUGUGCUGUGGAUUUUGU | 1898 |
| SNCA-890 | 19mer Sense Strand | GUGUGCUGUGGAUUUUGUG | 1899 |
| SNCA-891 | 19mer Sense Strand | UGUGCUGUGGAUUUUGUGG | 1900 |
| SNCA-892 | 19mer Sense Strand | GUGCUGUGGAUUUUGUGGC | 1901 |
| SNCA-893 | 19mer Sense Strand | UGCUGUGGAUUUUGUGGCU | 1902 |
| SNCA-894 | 19mer Sense Strand | GCUGUGGAUUUUGUGGCUU | 1903 |
| SNCA-895 | 19mer Sense Strand | CUGUGGAUUUUGUGGCUUC | 1904 |
| SNCA-897 | 19mer Sense Strand | GUGGAUUUUGUGGCUUCAA | 1905 |
| SNCA-898 | 19mer Sense Strand | UGGAUUUUGUGGCUUCAAU | 1906 |
| SNCA-900 | 19mer Sense Strand | GAUUUUGUGGCUUCAAUCU | 1907 |
| SNCA-901 | 19mer Sense Strand | AUUUUGUGGCUUCAAUCUA | 1908 |
| SNCA-956 | 19mer Sense Strand | CCACUUAUUUCUAAAUCCU | 1909 |
| SNCA-957 | 19mer Sense Strand | CACUUAUUUCUAAAUCCUC | 1910 |
| SNCA-958 | 19mer Sense Strand | ACUUAUUUCUAAAUCCUCA | 1911 |
| SNCA-959 | 19mer Sense Strand | CUUAUUUCUAAAUCCUCAC | 1912 |
| SNCA-961 | 19mer Sense Strand | UAUUUCUAAAUCCUCACUA | 1913 |
| SNCA-962 | 19mer Sense Strand | AUUUCUAAAUCCUCACUAU | 1914 |
| SNCA-963 | 19mer Sense Strand | UUUCUAAAUCCUCACUAUU | 1915 |
| SNCA-964 | 19mer Sense Strand | UUCUAAAUCCUCACUAUUU | 1916 |
| SNCA-965 | 19mer Sense Strand | UCUAAAUCCUCACUAUUUU | 1917 |
| SNCA-966 | 19mer Sense Strand | CUAAAUCCUCACUAUUUUU | 1918 |
| SNCA-967 | 19mer Sense Strand | UAAAUCCUCACUAUUUUUU | 1919 |
| SNCA-968 | 19mer Sense Strand | AAAUCCUCACUAUUUUUUU | 1920 |
| SNCA-969 | 19mer Sense Strand | AAUCCUCACUAUUUUUUUG | 1921 |
| SNCA-970 | 19mer Sense Strand | AUCCUCACUAUUUUUUUGU | 1922 |
| SNCA-971 | 19mer Sense Strand | UCCUCACUAUUUUUUUGUU | 1923 |
| SNCA-972 | 19mer Sense Strand | CCUCACUAUUUUUUUGUUG | 1924 |
| SNCA-973 | 19mer Sense Strand | CUCACUAUUUUUUUGUUGC | 1925 |
| SNCA-974 | 19mer Sense Strand | UCACUAUUUUUUUGUUGCU | 1926 |
| SNCA-975 | 19mer Sense Strand | CACUAUUUUUUUGUUGCUG | 1927 |
| SNCA-976 | 19mer Sense Strand | ACUAUUUUUUUGUUGCUGU | 1928 |
| SNCA-977 | 19mer Sense Strand | CUAUUUUUUUGUUGCUGUU | 1929 |
| SNCA-978 | 19mer Sense Strand | UAUUUUUUUGUUGCUGUUG | 1930 |
| SNCA-979 | 19mer Sense Strand | AUUUUUUUGUUGCUGUUGU | 1931 |
| SNCA-980 | 19mer Sense Strand | UUUUUUUGUUGCUGUUGUU | 1932 |
| SNCA-981 | 19mer Sense Strand | UUUUUUGUUGCUGUUGUUC | 1933 |
| SNCA-982 | 19mer Sense Strand | UUUUUGUUGCUGUUGUUCA | 1934 |
| SNCA-983 | 19mer Sense Strand | UUUUGUUGCUGUUGUUCAG | 1935 |
| SNCA-984 | 19mer Sense Strand | UUUGUUGCUGUUGUUCAGA | 1936 |
| SNCA-985 | 19mer Sense Strand | UUGUUGCUGUUGUUCAGAA | 1937 |
| SNCA-986 | 19mer Sense Strand | UGUUGCUGUUGUUCAGAAG | 1938 |
| SNCA-987 | 19mer Sense Strand | GUUGCUGUUGUUCAGAAGU | 1939 |
| SNCA-988 | 19mer Sense Strand | UUGCUGUUGUUCAGAAGUU | 1940 |
| SNCA-989 | 19mer Sense Strand | UGCUGUUGUUCAGAAGUUG | 1941 |
| SNCA-990 | 19mer Sense Strand | GCUGUUGUUCAGAAGUUGU | 1942 |
| SNCA-991 | 19mer Sense Strand | CUGUUGUUCAGAAGUUGUU | 1943 |
| SNCA-992 | 19mer Sense Strand | UGUUGUUCAGAAGUUGUUA | 1944 |
| SNCA-993 | 19mer Sense Strand | GUUGUUCAGAAGUUGUUAG | 1945 |
| SNCA-994 | 19mer Sense Strand | UUGUUCAGAAGUUGUUAGU | 1946 |
| SNCA-995 | 19mer Sense Strand | UGUUCAGAAGUUGUUAGUG | 1947 |
| SNCA-996 | 19mer Sense Strand | GUUCAGAAGUUGUUAGUGA | 1948 |
| SNCA-997 | 19mer Sense Strand | UUCAGAAGUUGUUAGUGAU | 1949 |
| SNCA-998 | 19mer Sense Strand | UCAGAAGUUGUUAGUGAUU | 1950 |
| SNCA-999 | 19mer Sense Strand | CAGAAGUUGUUAGUGAUUU | 1951 |
| SNCA- | 19mer Sense Strand | AGAAGUUGUUAGUGAUUUG | 1952 |
| 1000 | | | |
| SNCA- | 19mer Sense Strand | GAAGUUGUUAGUGAUUUGC | 1953 |
| 1001 | | | |
| SNCA- | 19mer Sense Strand | AAGUUGUUAGUGAUUUGCU | 1954 |
| 1002 | | | |
| SNCA- | 19mer Sense Strand | AGUUGUUAGUGAUUUGCUA | 1955 |
| 1003 | | | |
| SNCA- | 19mer Sense Strand | GUUGUUAGUGAUUUGCUAU | 1956 |
| 1004 | | | |
| SNCA- | 19mer Sense Strand | UUGUUAGUGAUUUGCUAUC | 1957 |
| 1005 | | | |
| SNCA- | 19mer Sense Strand | AUUAUAAGAUUUUUAGGUG | 1958 |
| 1028 | | | |
| SNCA- | 19mer Sense Strand | UUAUAAGAUUUUUAGGUGU | 1959 |
| 1029 | | | |
| SNCA- | 19mer Sense Strand | UAUAAGAUUUUUAGGUGUC | 1960 |
| 1030 | | | |
| SNCA- | 19mer Sense Strand | AUAAGAUUUUUAGGUGUCU | 1961 |
| 1031 | | | |
| SNCA- | 19mer Sense Strand | UAAGAUUUUUAGGUGUCUU | 1962 |
| 1032 | | | |
| SNCA- | 19mer Sense Strand | AAGAUUUUUAGGUGUCUUU | 1963 |
| 1033 | | | |
| SNCA- | 19mer Sense Strand | AGAUUUUUAGGUGUCUUUU | 1964 |
| 1034 | | | |
| SNCA- | 19mer Sense Strand | GAUUUUUAGGUGUCUUUUA | 1965 |
| 1035 | | | |
| SNCA- | 19mer Sense Strand | AUUUUUAGGUGUCUUUUAA | 1966 |
| 1036 | | | |
| SNCA- | 19mer Sense Strand | UUUUUAGGUGUCUUUUAAU | 1967 |
| 1037 | | | |
| SNCA- | 19mer Sense Strand | UUUUAGGUGUCUUUUAAUG | 1968 |
| 1038 | | | |
| SNCA- | 19mer Sense Strand | UUUAGGUGUCUUUUAAUGA | 1969 |
| 1039 | | | |
| SNCA- | 19mer Sense Strand | UUAGGUGUCUUUUAAUGAU | 1970 |
| 1040 | | | |
| SNCA- | 19mer Sense Strand | UAGGUGUCUUUUAAUGAUA | 1971 |
| 1041 | | | |
| SNCA- | 19mer Sense Strand | AGGUGUCUUUUAAUGAUAC | 1972 |
| 1042 | | | |
| SNCA- | 19mer Sense Strand | GGUGUCUUUUAAUGAUACU | 1973 |
| 1043 | | | |
| SNCA- | 19mer Sense Strand | GUGUCUUUUAAUGAUACUG | 1974 |
| 1044 | | | |
| SNCA- | 19mer Sense Strand | UGUCUUUUAAUGAUACUGU | 1975 |
| 1045 | | | |
| SNCA- | 19mer Sense Strand | GUCUUUUAAUGAUACUGUC | 1976 |
| 1046 | | | |
| SNCA- | 19mer Sense Strand | UCUUUUAAUGAUACUGUCU | 1977 |
| 1047 | | | |
| SNCA- | 19mer Sense Strand | CUUUUAAUGAUACUGUCUA | 1978 |
| 1048 | | | |
| SNCA- | 19mer Sense Strand | UUUUAAUGAUACUGUCUAA | 1979 |
| 1049 | | | |
| SNCA- | 19mer Sense Strand | UUUAAUGAUACUGUCUAAG | 1980 |
| 1050 | | | |
| SNCA- | 19mer Sense Strand | UUAAUGAUACUGUCUAAGA | 1981 |
| 1051 | | | |
| SNCA- | 19mer Sense Strand | UAAUGAUACUGUCUAAGAA | 1982 |
| 1052 | | | |
| SNCA- | 19mer Sense Strand | AAUGAUACUGUCUAAGAAU | 1983 |
| 1053 | | | |
| SNCA- | 19mer Sense Strand | AUGAUACUGUCUAAGAAUA | 1984 |
| 1054 | | | |
| SNCA- | 19mer Sense Strand | UGAUACUGUCUAAGAAUAA | 1985 |
| 1055 | | | |
| SNCA- | 19mer Sense Strand | GAUACUGUCUAAGAAUAAU | 1986 |
| 1056 | | | |
| SNCA- | 19mer Sense Strand | AUACUGUCUAAGAAUAAUG | 1987 |
| 1057 | | | |
| SNCA- | 19mer Sense Strand | UACUGUCUAAGAAUAAUGA | 1988 |
| 1058 | | | |
| SNCA- | 19mer Sense Strand | GUAUUGUGAAAUUUGUUAA | 1989 |
| 1078 | | | |
| SNCA- | 19mer Sense Strand | UAUUGUGAAAUUUGUUAAU | 1990 |
| 1079 | | | |
| SNCA- | 19mer Sense Strand | AUUGUGAAAUUUGUUAAUA | 1991 |
| 1080 | | | |
| SNCA- | 19mer Sense Strand | AAAUUUGUUAAUAUAUAUA | 1992 |
| 1086 | | | |
| SNCA- | 19mer Sense Strand | AAUUUGUUAAUAUAUAUAA | 1993 |
| 1087 | | | |
| SNCA- | 19mer Sense Strand | AUUUGUUAAUAUAUAUAAU | 1994 |
| 1088 | | | |
| SNCA- | 19mer Sense Strand | UUUGUUAAUAUAUAUAAUA | 1995 |
| 1089 | | | |
| SNCA- | 19mer Sense Strand | UUGUUAAUAUAUAUAAUAC | 1996 |
| 1090 | | | |
| SNCA- | 19mer Sense Strand | UGUUAAUAUAUAUAAUACU | 1997 |
| 1091 | | | |
| SNCA- | 19mer Sense Strand | GUUAAUAUAUAUAAUACUU | 1998 |
| 1092 | | | |
| SNCA- | 19mer Sense Strand | UUAAUAUAUAUAAUACUUA | 1999 |
| 1093 | | | |
| SNCA- | 19mer Sense Strand | UAUGUGAGCAUGAAACUAU | 2000 |
| 1116 | | | |
| SNCA- | 19mer Sense Strand | AUGUGAGCAUGAAACUAUG | 2001 |
| 1117 | | | |
| SNCA- | 19mer Sense Strand | GUGAGCAUGAAACUAUGCA | 2002 |
| 1119 | | | |
| SNCA- | 19mer Sense Strand | UGAGCAUGAAACUAUGCAC | 2003 |
| 1120 | | | |
| SNCA- | 19mer Sense Strand | GAGCAUGAAACUAUGCACC | 2004 |
| 1121 | | | |
| SNCA- | 19mer Sense Strand | AGCAUGAAACUAUGCACCU | 2005 |
| 1122 | | | |
| SNCA- | 19mer Sense Strand | GCAUGAAACUAUGCACCUA | 2006 |
| 1123 | | | |
| SNCA- | 19mer Sense Strand | CAUGAAACUAUGCACCUAU | 2007 |
| 1124 | | | |
| SNCA- | 19mer Sense Strand | AUGAAACUAUGCACCUAUA | 2008 |
| 1125 | | | |
| SNCA- | 19mer Sense Strand | UGAAACUAUGCACCUAUAA | 2009 |
| 1126 | | | |
| SNCA- | 19mer Sense Strand | GAAACUAUGCACCUAUAAA | 2010 |
| 1127 | | | |
| SNCA- | 19mer Sense Strand | AAACUAUGCACCUAUAAAU | 2011 |
| 1128 | | | |
| SNCA- | 19mer Sense Strand | AACUAUGCACCUAUAAAUA | 2012 |
| 1129 | | | |
| SNCA- | 19mer Sense Strand | ACUAUGCACCUAUAAAUAC | 2013 |
| 1130 | | | |
| SNCA- | 19mer Sense Strand | CUAUGCACCUAUAAAUACU | 2014 |
| 1131 | | | |
| SNCA- | 19mer Sense Strand | UAUGCACCUAUAAAUACUA | 2015 |
| 1132 | | | |
| SNCA- | 19mer Sense Strand | AUGCACCUAUAAAUACUAA | 2016 |
| 1133 | | | |
| SNCA- | 19mer Sense Strand | GUUUGUAUAUAAAUGGUGA | 2017 |
| 1194 | | | |
| SNCA- | 19mer Sense Strand | UUUGUAUAUAAAUGGUGAG | 2018 |
| 1195 | | | |
| SNCA- | 19mer Sense Strand | UUGUAUAUAAAUGGUGAGA | 2019 |
| 1196 | | | |
| SNCA- | 19mer Sense Strand | UGUAUAUAAAUGGUGAGAA | 2020 |
| 1197 | | | |
| SNCA- | 19mer Sense Strand | GUAUAUAAAUGGUGAGAAU | 2021 |
| 1198 | | | |
| SNCA- | 19mer Sense Strand | UAUAUAAAUGGUGAGAAUU | 2022 |
| 1199 | | | |
| SNCA- | 19mer Sense Strand | AUAUAAAUGGUGAGAAUUA | 2023 |
| 1200 | | | |
| SNCA- | 19mer Sense Strand | UAUAAAUGGUGAGAAUUAA | 2024 |
| 1201 | | | |
| SNCA- | 19mer Sense Strand | AUAAAUGGUGAGAAUUAAA | 2025 |
| 1202 | | | |
| SNCA- | 19mer Sense Strand | UAAAUGGUGAGAAUUAAAA | 2026 |
| 1203 | | | |
| SNCA- | 19mer Sense Strand | AAAUGGUGAGAAUUAAAAU | 2027 |
| 1204 | | | |
| SNCA- | 19mer Sense Strand | AAUGGUGAGAAUUAAAAUA | 2028 |
| 1205 | | | |
| SNCA- | 19mer Sense Strand | AUGGUGAGAAUUAAAAUAA | 2029 |
| 1206 | | | |
| SNCA- | 19mer Sense Strand | UGGUGAGAAUUAAAAUAAA | 2030 |
| 1207 | | | |
| SNCA- | 19mer Sense Strand | GGUGAGAAUUAAAAUAAAA | 2031 |
| 1208 | | | |
| SNCA- | 19mer Sense Strand | UUAUUUUUAUCCCAUCUCA | 2032 |
| 1250 | | | |
| SNCA- | 19mer Sense Strand | AUUUUUAUCCCAUCUCACU | 2033 |
| 1252 | | | |
| SNCA- | 19mer Sense Strand | UUUUUAUCCCAUCUCACUU | 2034 |
| 1253 | | | |
| SNCA- | 19mer Sense Strand | UUUUAUCCCAUCUCACUUU | 2035 |
| 1254 | | | |
| SNCA- | 19mer Sense Strand | UUUAUCCCAUCUCACUUUA | 2036 |
| 1255 | | | |
| SNCA- | 19mer Sense Strand | UUAUCCCAUCUCACUUUAA | 2037 |
| 1256 | | | |
| SNCA- | 19mer Sense Strand | UAUCCCAUCUCACUUUAAU | 2038 |
| 1257 | | | |
| SNCA- | 19mer Sense Strand | AUCCCAUCUCACUUUAAUA | 2039 |
| 1258 | | | |
| SNCA- | 19mer Sense Strand | UCCCAUCUCACUUUAAUAA | 2040 |
| 1259 | | | |
| SNCA- | 19mer Sense Strand | CCCAUCUCACUUUAAUAAU | 2041 |
| 1260 | | | |
| SNCA- | 19mer Sense Strand | CCAUCUCACUUUAAUAAUA | 2042 |
| 1261 | | | |
| SNCA- | 19mer Sense Strand | CAUCUCACUUUAAUAAUAA | 2043 |
| 1262 | | | |
| SNCA- | 19mer Sense Strand | AUCUCACUUUAAUAAUAAA | 2044 |
| 1263 | | | |
| SNCA- | 19mer Sense Strand | UCUCACUUUAAUAAUAAAA | 2045 |
| 1264 | | | |
| SNCA- | 19mer Sense Strand | CUCACUUUAAUAAUAAAAA | 2046 |
| 1265 | | | |
| SNCA- | 19mer Sense Strand | UCACUUUAAUAAUAAAAAU | 2047 |
| 1266 | | | |
| SNCA- | 19mer Sense Strand | CACUUUAAUAAUAAAAAUC | 2048 |
| 1267 | | | |
| SNCA- | 19mer Sense Strand | AUUUGAAGAAGGAGGAAUU | 2049 |
| 1351 | | | |
| SNCA- | 19mer Sense Strand | GAAUUUUAGAAGAGGUAGA | 2050 |
| 1365 | | | |
| SNCA- | 19mer Sense Strand | AGAAGAGGUAGAGAAAAUG | 2051 |
| 1372 | | | |
| SNCA- | 19mer Sense Strand | GAAGAGGUAGAGAAAAUGG | 2052 |
| 1373 | | | |
| SNCA- | 19mer Sense Strand | AAGAGGUAGAGAAAAUGGA | 2053 |
| 1374 | | | |
| SNCA- | 19mer Sense Strand | AGAGGUAGAGAAAAUGGAA | 2054 |
| 1375 | | | |
| SNCA- | 19mer Sense Strand | GAGGUAGAGAAAAUGGAAC | 2055 |
| 1376 | | | |
| SNCA- | 19mer Sense Strand | AGGUAGAGAAAAUGGAACA | 2056 |
| 1377 | | | |
| SNCA- | 19mer Sense Strand | GUAGAGAAAAUGGAACAUU | 2057 |
| 1379 | | | |
| SNCA- | 19mer Sense Strand | UAGAGAAAAUGGAACAUUA | 2058 |
| 1380 | | | |
| SNCA- | 19mer Sense Strand | AGAGAAAAUGGAACAUUAA | 2059 |
| 1381 | | | |
| SNCA- | 19mer Sense Strand | GAGAAAAUGGAACAUUAAC | 2060 |
| 1382 | | | |
| SNCA- | 19mer Sense Strand | AGAAAAUGGAACAUUAACC | 2061 |
| 1383 | | | |
| SNCA- | 19mer Sense Strand | GAAAAUGGAACAUUAACCC | 2062 |
| 1384 | | | |
| SNCA- | 19mer Sense Strand | AAAAUGGAACAUUAACCCU | 2063 |
| 1385 | | | |
| SNCA- | 19mer Sense Strand | AUGGAACAUUAACCCUACA | 2064 |
| 1388 | | | |
| SNCA- | 19mer Sense Strand | ACUGCCAGAAGUGUGUUUU | 2065 |
| 1428 | | | |
| SNCA- | 19mer Sense Strand | CUGCCAGAAGUGUGUUUUG | 2066 |
| 1429 | | | |
| SNCA-259 | 19mer Anti-Sense | UUGAAAGUCCUUUCAUGAA | 2067 |
| | Strand | | |
| SNCA-260 | 19mer Anti-Sense | UUUGAAAGUCCUUUCAUGA | 2068 |
| | Strand | | |
| SNCA-261 | 19mer Anti-Sense | CUUUGAAAGUCCUUUCAUG | 2069 |
| | Strand | | |
| SNCA-262 | 19mer Anti-Sense | CCUUUGAAAGUCCUUUCAU | 2070 |
| | Strand | | |
| SNCA-263 | 19mer Anti-Sense | GCCUUUGAAAGUCCUUUCA | 2071 |
| | Strand | | |
| SNCA-264 | 19mer Anti-Sense | GGCCUUUGAAAGUCCUUUC | 2072 |
| | Strand | | |
| SNCA-285 | 19mer Anti-Sense | AGCAGCCACAACUCCCUCC | 2073 |
| | Strand | | |
| SNCA-288 | 19mer Anti-Sense | AGCAGCAGCCACAACUCCC | 2074 |
| | Strand | | |
| SNCA-289 | 19mer Anti-Sense | CAGCAGCAGCCACAACUCC | 2075 |
| | Strand | | |
| SNCA-290 | 19mer Anti-Sense | UCAGCAGCAGCCACAACUC | 2076 |
| | Strand | | |
| SNCA-292 | 19mer Anti-Sense | UCUCAGCAGCAGCCACAAC | 2077 |
| | Strand | | |
| SNCA-293 | 19mer Anti-Sense | UUCUCAGCAGCAGCCACAA | 2078 |
| | Strand | | |
| SNCA-294 | 19mer Anti-Sense | UUUCUCAGCAGCAGCCACA | 2079 |
| | Strand | | |
| SNCA-295 | 19mer Anti-Sense | UUUUCUCAGCAGCAGCCAC | 2080 |
| | Strand | | |
| SNCA-296 | 19mer Anti-Sense | GUUUUCUCAGCAGCAGCCA | 2081 |
| | Strand | | |
| SNCA-297 | 19mer Anti-Sense | GGUUUUCUCAGCAGCAGCC | 2082 |
| | Strand | | |
| SNCA-407 | 19mer Anti-Sense | GUCUUCUCAGCCACUGUUG | 2083 |
| | Strand | | |
| SNCA-408 | 19mer Anti-Sense | GGUCUUCUCAGCCACUGUU | 2084 |
| | Strand | | |
| SNCA-409 | 19mer Anti-Sense | UGGUCUUCUCAGCCACUGU | 2085 |
| | Strand | | |
| SNCA-410 | 19mer Anti-Sense | UUGGUCUUCUCAGCCACUG | 2086 |
| | Strand | | |
| SNCA-411 | 19mer Anti-Sense | UUUGGUCUUCUCAGCCACU | 2087 |
| | Strand | | |
| SNCA-412 | 19mer Anti-Sense | CUUUGGUCUUCUCAGCCAC | 2088 |
| | Strand | | |
| SNCA-413 | 19mer Anti-Sense | UCUUUGGUCUUCUCAGCCA | 2089 |
| | Strand | | |
| SNCA-414 | 19mer Anti-Sense | CUCUUUGGUCUUCUCAGCC | 2090 |
| | Strand | | |
| SNCA-415 | 19mer Anti-Sense | GCUCUUUGGUCUUCUCAGC | 2091 |
| | Strand | | |
| SNCA-416 | 19mer Anti-Sense | UGCUCUUUGGUCUUCUCAG | 2092 |
| | Strand | | |
| SNCA-417 | 19mer Anti-Sense | UUGCUCUUUGGUCUUCUCA | 2093 |
| | Strand | | |
| SNCA-418 | 19mer Anti-Sense | CUUGCUCUUUGGUCUUCUC | 2094 |
| | Strand | | |
| SNCA-419 | 19mer Anti-Sense | ACUUGCUCUUUGGUCUUCU | 2095 |
| | Strand | | |
| SNCA-420 | 19mer Anti-Sense | CACUUGCUCUUUGGUCUUC | 2096 |
| | Strand | | |
| SNCA-421 | 19mer Anti-Sense | UCACUUGCUCUUUGGUCUU | 2097 |
| | Strand | | |
| SNCA-422 | 19mer Anti-Sense | GUCACUUGCUCUUUGGUCU | 2098 |
| | Strand | | |
| SNCA-423 | 19mer Anti-Sense | UGUCACUUGCUCUUUGGUC | 2099 |
| | Strand | | |
| SNCA-424 | 19mer Anti-Sense | UUGUCACUUGCUCUUUGGU | 2100 |
| | Strand | | |
| SNCA-425 | 19mer Anti-Sense | UUUGUCACUUGCUCUUUGG | 2101 |
| | Strand | | |
| SNCA-426 | 19mer Anti-Sense | AUUUGUCACUUGCUCUUUG | 2102 |
| | Strand | | |
| SNCA-427 | 19mer Anti-Sense | CAUUUGUCACUUGCUCUUU | 2103 |
| | Strand | | |
| SNCA-428 | 19mer Anti-Sense | ACAUUUGUCACUUGCUCUU | 2104 |
| | Strand | | |
| SNCA-429 | 19mer Anti-Sense | AACAUUUGUCACUUGCUCU | 2105 |
| | Strand | | |
| SNCA-430 | 19mer Anti-Sense | CAACAUUUGUCACUUGCUC | 2106 |
| | Strand | | |
| SNCA-431 | 19mer Anti-Sense | CCAACAUUUGUCACUUGCU | 2107 |
| | Strand | | |
| SNCA-432 | 19mer Anti-Sense | UCCAACAUUUGUCACUUGC | 2108 |
| | Strand | | |
| SNCA-433 | 19mer Anti-Sense | CUCCAACAUUUGUCACUUG | 2109 |
| | Strand | | |
| SNCA-434 | 19mer Anti-Sense | CCUCCAACAUUUGUCACUU | 2110 |
| | Strand | | |
| SNCA-435 | 19mer Anti-Sense | UCCUCCAACAUUUGUCACU | 2111 |
| | Strand | | |
| SNCA-436 | 19mer Anti-Sense | CUCCUCCAACAUUUGUCAC | 2112 |
| | Strand | | |
| SNCA-437 | 19mer Anti-Sense | GCUCCUCCAACAUUUGUCA | 2113 |
| | Strand | | |
| SNCA-725 | 19mer Anti-Sense | UGGAACUGAGCACUUGUAC | 2114 |
| | Strand | | |
| SNCA-726 | 19mer Anti-Sense | UUGGAACUGAGCACUUGUA | 2115 |
| | Strand | | |
| SNCA-727 | 19mer Anti-Sense | AUUGGAACUGAGCACUUGU | 2116 |
| | Strand | | |
| SNCA-728 | 19mer Anti-Sense | CAUUGGAACUGAGCACUUG | 2117 |
| | Strand | | |
| SNCA-729 | 19mer Anti-Sense | ACAUUGGAACUGAGCACUU | 2118 |
| | Strand | | |
| SNCA-730 | 19mer Anti-Sense | CACAUUGGAACUGAGCACU | 2119 |
| | Strand | | |
| SNCA-731 | 19mer Anti-Sense | GCACAUUGGAACUGAGCAC | 2120 |
| | Strand | | |
| SNCA-732 | 19mer Anti-Sense | GGCACAUUGGAACUGAGCA | 2121 |
| | Strand | | |
| SNCA-733 | 19mer Anti-Sense | GGGCACAUUGGAACUGAGC | 2122 |
| | Strand | | |
| SNCA-734 | 19mer Anti-Sense | UGGGCACAUUGGAACUGAG | 2123 |
| | Strand | | |
| SNCA-735 | 19mer Anti-Sense | CUGGGCACAUUGGAACUGA | 2124 |
| | Strand | | |
| SNCA-736 | 19mer Anti-Sense | ACUGGGCACAUUGGAACUG | 2125 |
| | Strand | | |
| SNCA-737 | 19mer Anti-Sense | GACUGGGCACAUUGGAACU | 2126 |
| | Strand | | |
| SNCA-738 | 19mer Anti-Sense | UGACUGGGCACAUUGGAAC | 2127 |
| | Strand | | |
| SNCA-739 | 19mer Anti-Sense | AUGACUGGGCACAUUGGAA | 2128 |
| | Strand | | |
| SNCA-740 | 19mer Anti-Sense | CAUGACUGGGCACAUUGGA | 2129 |
| | Strand | | |
| SNCA-741 | 19mer Anti-Sense | UCAUGACUGGGCACAUUGG | 2130 |
| | Strand | | |
| SNCA-742 | 19mer Anti-Sense | GUCAUGACUGGGCACAUUG | 2131 |
| | Strand | | |
| SNCA-790 | 19mer Anti-Sense | CACUGCUGAUGGAAGACUU | 2132 |
| | Strand | | |
| SNCA-791 | 19mer Anti-Sense | UCACUGCUGAUGGAAGACU | 2133 |
| | Strand | | |
| SNCA-792 | 19mer Anti-Sense | AUCACUGCUGAUGGAAGAC | 2134 |
| | Strand | | |
| SNCA-938 | 19mer Anti-Sense | GUAGUCACUUAGGUGUUUU | 2135 |
| | Strand | | |
| SNCA-939 | 19mer Anti-Sense | GGUAGUCACUUAGGUGUUU | 2136 |
| | Strand | | |
| SNCA-940 | 19mer Anti-Sense | UGGUAGUCACUUAGGUGUU | 2137 |
| | Strand | | |
| SNCA-941 | 19mer Anti-Sense | GUGGUAGUCACUUAGGUGU | 2138 |
| | Strand | | |
| SNCA-942 | 19mer Anti-Sense | AGUGGUAGUCACUUAGGUG | 2139 |
| | Strand | | |
| SNCA-943 | 19mer Anti-Sense | AAGUGGUAGUCACUUAGGU | 2140 |
| | Strand | | |
| SNCA-944 | 19mer Anti-Sense | UAAGUGGUAGUCACUUAGG | 2141 |
| | Strand | | |
| SNCA-945 | 19mer Anti-Sense | AUAAGUGGUAGUCACUUAG | 2142 |
| | Strand | | |
| SNCA-946 | 19mer Anti-Sense | AAUAAGUGGUAGUCACUUA | 2143 |
| | Strand | | |
| SNCA-947 | 19mer Anti-Sense | AAAUAAGUGGUAGUCACUU | 2144 |
| | Strand | | |
| SNCA-948 | 19mer Anti-Sense | GAAAUAAGUGGUAGUCACU | 2145 |
| | Strand | | |
| SNCA-949 | 19mer Anti-Sense | AGAAAUAAGUGGUAGUCAC | 2146 |
| | Strand | | |
| SNCA-950 | 19mer Anti-Sense | UAGAAAUAAGUGGUAGUCA | 2147 |
| | Strand | | |
| SNCA-951 | 19mer Anti-Sense | UUAGAAAUAAGUGGUAGUC | 2148 |
| | Strand | | |
| SNCA-952 | 19mer Anti-Sense | UUUAGAAAUAAGUGGUAGU | 2149 |
| | Strand | | |
| SNCA-953 | 19mer Anti-Sense | AUUUAGAAAUAAGUGGUAG | 2150 |
| | Strand | | |
| SNCA-954 | 19mer Anti-Sense | GAUUUAGAAAUAAGUGGUA | 2151 |
| | Strand | | |
| SNCA- | 19mer Anti-Sense | AUAUUAACAAAUUUCACAA | 2152 |
| 1081 | Strand | | |
| SNCA- | 19mer Anti-Sense | UAUAUUAACAAAUUUCACA | 2153 |
| 1082 | Strand | | |
| SNCA- | 19mer Anti-Sense | AUAUAUUAACAAAUUUCAC | 2154 |
| 1083 | Strand | | |
| SNCA- | 19mer Anti-Sense | UAUAUAUUAACAAAUUUCA | 2155 |
| 1084 | Strand | | |
| SNCA- | 19mer Anti-Sense | AUAUAUAUUAACAAAUUUC | 2156 |
| 1085 | Strand | | |
| SNCA- | 19mer Anti-Sense | UUUAUAUACAAACACAAGU | 2157 |
| 1188 | Strand | | |
| SNCA- | 19mer Anti-Sense | AUUUAUAUACAAACACAAG | 2158 |
| 1189 | Strand | | |
| SNCA- | 19mer Anti-Sense | CAUUUAUAUACAAACACAA | 2159 |
| 1190 | Strand | | |
| SNCA- | 19mer Anti-Sense | CCAUUUAUAUACAAACACA | 2160 |
| 1191 | Strand | | |
| SNCA- | 19mer Anti-Sense | ACCAUUUAUAUACAAACAC | 2161 |
| 1192 | Strand | | |
| SNCA- | 19mer Anti-Sense | CACCAUUUAUAUACAAACA | 2162 |
| 1193 | Strand | | |
| SNCA-225 | 19mer Anti-Sense | UGAAUUCCUUUACACCACA | 2163 |
| | Strand | | |
| SNCA-226 | 19mer Anti-Sense | AUGAAUUCCUUUACACCAC | 2164 |
| | Strand | | |
| SNCA-227 | 19mer Anti-Sense | AAUGAAUUCCUUUACACCA | 2165 |
| | Strand | | |
| SNCA-228 | 19mer Anti-Sense | UAAUGAAUUCCUUUACACC | 2166 |
| | Strand | | |
| SNCA-229 | 19mer Anti-Sense | CUAAUGAAUUCCUUUACAC | 2167 |
| | Strand | | |
| SNCA-230 | 19mer Anti-Sense | GCUAAUGAAUUCCUUUACA | 2168 |
| | Strand | | |
| SNCA-231 | 19mer Anti-Sense | GGCUAAUGAAUUCCUUUAC | 2169 |
| | Strand | | |
| SNCA-232 | 19mer Anti-Sense | UGGCUAAUGAAUUCCUUUA | 2170 |
| | Strand | | |
| SNCA-233 | 19mer Anti-Sense | AUGGCUAAUGAAUUCCUUU | 2171 |
| | Strand | | |
| SNCA-234 | 19mer Anti-Sense | CAUGGCUAAUGAAUUCCUU | 2172 |
| | Strand | | |
| SNCA-235 | 19mer Anti-Sense | CCAUGGCUAAUGAAUUCCU | 2173 |
| | Strand | | |
| SNCA-236 | 19mer Anti-Sense | UCCAUGGCUAAUGAAUUCC | 2174 |
| | Strand | | |
| SNCA-237 | 19mer Anti-Sense | AUCCAUGGCUAAUGAAUUC | 2175 |
| | Strand | | |
| SNCA-238 | 19mer Anti-Sense | CAUCCAUGGCUAAUGAAUU | 2176 |
| | Strand | | |
| SNCA-239 | 19mer Anti-Sense | ACAUCCAUGGCUAAUGAAU | 2177 |
| | Strand | | |
| SNCA-240 | 19mer Anti-Sense | UACAUCCAUGGCUAAUGAA | 2178 |
| | Strand | | |
| SNCA-241 | 19mer Anti-Sense | AUACAUCCAUGGCUAAUGA | 2179 |
| | Strand | | |
| SNCA-242 | 19mer Anti-Sense | AAUACAUCCAUGGCUAAUG | 2180 |
| | Strand | | |
| SNCA-243 | 19mer Anti-Sense | GAAUACAUCCAUGGCUAAU | 2181 |
| | Strand | | |
| SNCA-244 | 19mer Anti-Sense | UGAAUACAUCCAUGGCUAA | 2182 |
| | Strand | | |
| SNCA-245 | 19mer Anti-Sense | AUGAAUACAUCCAUGGCUA | 2183 |
| | Strand | | |
| SNCA-246 | 19mer Anti-Sense | CAUGAAUACAUCCAUGGCU | 2184 |
| | Strand | | |
| SNCA-247 | 19mer Anti-Sense | UCAUGAAUACAUCCAUGGC | 2185 |
| | Strand | | |
| SNCA-248 | 19mer Anti-Sense | UUCAUGAAUACAUCCAUGG | 2186 |
| | Strand | | |
| SNCA-249 | 19mer Anti-Sense | UUUCAUGAAUACAUCCAUG | 2187 |
| | Strand | | |
| SNCA-250 | 19mer Anti-Sense | CUUUCAUGAAUACAUCCAU | 2188 |
| | Strand | | |
| SNCA-251 | 19mer Anti-Sense | CCUUUCAUGAAUACAUCCA | 2189 |
| | Strand | | |
| SNCA-252 | 19mer Anti-Sense | UCCUUUCAUGAAUACAUCC | 2190 |
| | Strand | | |
| SNCA-253 | 19mer Anti-Sense | GUCCUUUCAUGAAUACAUC | 2191 |
| | Strand | | |
| SNCA-254 | 19mer Anti-Sense | AGUCCUUUCAUGAAUACAU | 2192 |
| | Strand | | |
| SNCA-256 | 19mer Anti-Sense | AAAGUCCUUUCAUGAAUAC | 2193 |
| | Strand | | |
| SNCA-330 | 19mer Anti-Sense | UGUCUUUCCUGCUGCUUCU | 2194 |
| | Strand | | |
| SNCA-335 | 19mer Anti-Sense | UCUUUUGUCUUUCCUGCUG | 2195 |
| | Strand | | |
| SNCA-337 | 19mer Anti-Sense | CCUCUUUUGUCUUUCCUGC | 2196 |
| | Strand | | |
| SNCA-341 | 19mer Anti-Sense | ACACCCUCUUUUGUCUUUC | 2197 |
| | Strand | | |
| SNCA-342 | 19mer Anti-Sense | AACACCCUCUUUUGUCUUU | 2198 |
| | Strand | | |
| SNCA-344 | 19mer Anti-Sense | AGAACACCCUCUUUUGUCU | 2199 |
| | Strand | | |
| SNCA-345 | 19mer Anti-Sense | GAGAACACCCUCUUUUGUC | 2200 |
| | Strand | | |
| SNCA-351 | 19mer Anti-Sense | UACAUAGAGAACACCCUCU | 2201 |
| | Strand | | |
| SNCA-353 | 19mer Anti-Sense | CCUACAUAGAGAACACCCU | 2202 |
| | Strand | | |
| SNCA-355 | 19mer Anti-Sense | AGCCUACAUAGAGAACACC | 2203 |
| | Strand | | |
| SNCA-638 | 19mer Anti-Sense | UAGUCUUGAUACCCUUCCU | 2204 |
| | Strand | | |
| SNCA-641 | 19mer Anti-Sense | UCGUAGUCUUGAUACCCUU | 2205 |
| | Strand | | |
| SNCA-642 | 19mer Anti-Sense | UUCGUAGUCUUGAUACCCU | 2206 |
| | Strand | | |
| SNCA-647 | 19mer Anti-Sense | UCAGGUUCGUAGUCUUGAU | 2207 |
| | Strand | | |
| SNCA-648 | 19mer Anti-Sense | UUCAGGUUCGUAGUCUUGA | 2208 |
| | Strand | | |
| SNCA-650 | 19mer Anti-Sense | GCUUCAGGUUCGUAGUCUU | 2209 |
| | Strand | | |
| SNCA-652 | 19mer Anti-Sense | AGGCUUCAGGUUCGUAGUC | 2210 |
| | Strand | | |
| SNCA-653 | 19mer Anti-Sense | UAGGCUUCAGGUUCGUAGU | 2211 |
| | Strand | | |
| SNCA-654 | 19mer Anti-Sense | UUAGGCUUCAGGUUCGUAG | 2212 |
| | Strand | | |
| SNCA-656 | 19mer Anti-Sense | UCUUAGGCUUCAGGUUCGU | 2213 |
| | Strand | | |
| SNCA-657 | 19mer Anti-Sense | UUCUUAGGCUUCAGGUUCG | 2214 |
| | Strand | | |
| SNCA-659 | 19mer Anti-Sense | AUUUCUUAGGCUUCAGGUU | 2215 |
| | Strand | | |
| SNCA-660 | 19mer Anti-Sense | UAUUUCUUAGGCUUCAGGU | 2216 |
| | Strand | | |
| SNCA-661 | 19mer Anti-Sense | AUAUUUCUUAGGCUUCAGG | 2217 |
| | Strand | | |
| SNCA-662 | 19mer Anti-Sense | GAUAUUUCUUAGGCUUCAG | 2218 |
| | Strand | | |
| SNCA-663 | 19mer Anti-Sense | AGAUAUUUCUUAGGCUUCA | 2219 |
| | Strand | | |
| SNCA-668 | 19mer Anti-Sense | AGCAAAGAUAUUUCUUAGG | 2220 |
| | Strand | | |
| SNCA-669 | 19mer Anti-Sense | GAGCAAAGAUAUUUCUUAG | 2221 |
| | Strand | | |
| SNCA-672 | 19mer Anti-Sense | UGGGAGCAAAGAUAUUUCU | 2222 |
| | Strand | | |
| SNCA-675 | 19mer Anti-Sense | AACUGGGAGCAAAGAUAUU | 2223 |
| | Strand | | |
| SNCA-676 | 19mer Anti-Sense | AAACUGGGAGCAAAGAUAU | 2224 |
| | Strand | | |
| SNCA-689 | 19mer Anti-Sense | AGCAGAUCUCAAGAAACUG | 2225 |
| | Strand | | |
| SNCA-724 | 19mer Anti-Sense | GGAACUGAGCACUUGUACA | 2226 |
| | Strand | | |
| SNCA-744 | 19mer Anti-Sense | AUGUCAUGACUGGGCACAU | 2227 |
| | Strand | | |
| SNCA-745 | 19mer Anti-Sense | AAUGUCAUGACUGGGCACA | 2228 |
| | Strand | | |
| SNCA-746 | 19mer Anti-Sense | AAAUGUCAUGACUGGGCAC | 2229 |
| | Strand | | |
| SNCA-751 | 19mer Anti-Sense | UUGAGAAAUGUCAUGACUG | 2230 |
| | Strand | | |
| SNCA-752 | 19mer Anti-Sense | UUUGAGAAAUGUCAUGACU | 2231 |
| | Strand | | |
| SNCA-753 | 19mer Anti-Sense | CUUUGAGAAAUGUCAUGAC | 2232 |
| | Strand | | |
| SNCA-754 | 19mer Anti-Sense | ACUUUGAGAAAUGUCAUGA | 2233 |
| | Strand | | |
| SNCA-755 | 19mer Anti-Sense | AACUUUGAGAAAUGUCAUG | 2234 |
| | Strand | | |
| SNCA-756 | 19mer Anti-Sense | AAACUUUGAGAAAUGUCAU | 2235 |
| | Strand | | |
| SNCA-757 | 19mer Anti-Sense | AAAACUUUGAGAAAUGUCA | 2236 |
| | Strand | | |
| SNCA-758 | 19mer Anti-Sense | AAAAACUUUGAGAAAUGUC | 2237 |
| | Strand | | |
| SNCA-759 | 19mer Anti-Sense | UAAAAACUUUGAGAAAUGU | 2238 |
| | Strand | | |
| SNCA-760 | 19mer Anti-Sense | GUAAAAACUUUGAGAAAUG | 2239 |
| | Strand | | |
| SNCA-761 | 19mer Anti-Sense | UGUAAAAACUUUGAGAAAU | 2240 |
| | Strand | | |
| SNCA-762 | 19mer Anti-Sense | CUGUAAAAACUUUGAGAAA | 2241 |
| | Strand | | |
| SNCA-789 | 19mer Anti-Sense | ACUGCUGAUGGAAGACUUC | 2242 |
| | Strand | | |
| SNCA-795 | 19mer Anti-Sense | UCAAUCACUGCUGAUGGAA | 2243 |
| | Strand | | |
| SNCA-796 | 19mer Anti-Sense | UUCAAUCACUGCUGAUGGA | 2244 |
| | Strand | | |
| SNCA-797 | 19mer Anti-Sense | CUUCAAUCACUGCUGAUGG | 2245 |
| | Strand | | |
| SNCA-798 | 19mer Anti-Sense | ACUUCAAUCACUGCUGAUG | 2246 |
| | Strand | | |
| SNCA-799 | 19mer Anti-Sense | UACUUCAAUCACUGCUGAU | 2247 |
| | Strand | | |
| SNCA-800 | 19mer Anti-Sense | AUACUUCAAUCACUGCUGA | 2248 |
| | Strand | | |
| SNCA-801 | 19mer Anti-Sense | GAUACUUCAAUCACUGCUG | 2249 |
| | Strand | | |
| SNCA-802 | 19mer Anti-Sense | AGAUACUUCAAUCACUGCU | 2250 |
| | Strand | | |
| SNCA-803 | 19mer Anti-Sense | CAGAUACUUCAAUCACUGC | 2251 |
| | Strand | | |
| SNCA-804 | 19mer Anti-Sense | ACAGAUACUUCAAUCACUG | 2252 |
| | Strand | | |
| SNCA-805 | 19mer Anti-Sense | UACAGAUACUUCAAUCACU | 2253 |
| | Strand | | |
| SNCA-809 | 19mer Anti-Sense | CAGGUACAGAUACUUCAAU | 2254 |
| | Strand | | |
| SNCA-839 | 19mer Anti-Sense | AAAGGGAAGCACCGAAAUG | 2255 |
| | Strand | | |
| SNCA-844 | 19mer Anti-Sense | CAGUGAAAGGGAAGCACCG | 2256 |
| | Strand | | |
| SNCA-845 | 19mer Anti-Sense | UCAGUGAAAGGGAAGCACC | 2257 |
| | Strand | | |
| SNCA-846 | 19mer Anti-Sense | UUCAGUGAAAGGGAAGCAC | 2258 |
| | Strand | | |
| SNCA-847 | 19mer Anti-Sense | CUUCAGUGAAAGGGAAGCA | 2259 |
| | Strand | | |
| SNCA-848 | 19mer Anti-Sense | ACUUCAGUGAAAGGGAAGC | 2260 |
| | Strand | | |
| SNCA-849 | 19mer Anti-Sense | CACUUCAGUGAAAGGGAAG | 2261 |
| | Strand | | |
| SNCA-850 | 19mer Anti-Sense | UCACUUCAGUGAAAGGGAA | 2262 |
| | Strand | | |
| SNCA-851 | 19mer Anti-Sense | UUCACUUCAGUGAAAGGGA | 2263 |
| | Strand | | |
| SNCA-852 | 19mer Anti-Sense | AUUCACUUCAGUGAAAGGG | 2264 |
| | Strand | | |
| SNCA-853 | 19mer Anti-Sense | UAUUCACUUCAGUGAAAGG | 2265 |
| | Strand | | |
| SNCA-854 | 19mer Anti-Sense | GUAUUCACUUCAGUGAAAG | 2266 |
| | Strand | | |
| SNCA-855 | 19mer Anti-Sense | UGUAUUCACUUCAGUGAAA | 2267 |
| | Strand | | |
| SNCA-856 | 19mer Anti-Sense | AUGUAUUCACUUCAGUGAA | 2268 |
| | Strand | | |
| SNCA-857 | 19mer Anti-Sense | CAUGUAUUCACUUCAGUGA | 2269 |
| | Strand | | |
| SNCA-858 | 19mer Anti-Sense | CCAUGUAUUCACUUCAGUG | 2270 |
| | Strand | | |
| SNCA-859 | 19mer Anti-Sense | ACCAUGUAUUCACUUCAGU | 2271 |
| | Strand | | |
| SNCA-860 | 19mer Anti-Sense | UACCAUGUAUUCACUUCAG | 2272 |
| | Strand | | |
| SNCA-861 | 19mer Anti-Sense | CUACCAUGUAUUCACUUCA | 2273 |
| | Strand | | |
| SNCA-863 | 19mer Anti-Sense | UGCUACCAUGUAUUCACUU | 2274 |
| | Strand | | |
| SNCA-864 | 19mer Anti-Sense | CUGCUACCAUGUAUUCACU | 2275 |
| | Strand | | |
| SNCA-865 | 19mer Anti-Sense | CCUGCUACCAUGUAUUCAC | 2276 |
| | Strand | | |
| SNCA-867 | 19mer Anti-Sense | ACCCUGCUACCAUGUAUUC | 2277 |
| | Strand | | |
| SNCA-868 | 19mer Anti-Sense | GACCCUGCUACCAUGUAUU | 2278 |
| | Strand | | |
| SNCA-875 | 19mer Anti-Sense | ACACAAAGACCCUGCUACC | 2279 |
| | Strand | | |
| SNCA-881 | 19mer Anti-Sense | CACAGCACACAAAGACCCU | 2280 |
| | Strand | | |
| SNCA-883 | 19mer Anti-Sense | UCCACAGCACACAAAGACC | 2281 |
| | Strand | | |
| SNCA-889 | 19mer Anti-Sense | ACAAAAUCCACAGCACACA | 2282 |
| | Strand | | |
| SNCA-890 | 19mer Anti-Sense | CACAAAAUCCACAGCACAC | 2283 |
| | Strand | | |
| SNCA-891 | 19mer Anti-Sense | CCACAAAAUCCACAGCACA | 2284 |
| | Strand | | |
| SNCA-892 | 19mer Anti-Sense | GCCACAAAAUCCACAGCAC | 2285 |
| | Strand | | |
| SNCA-893 | 19mer Anti-Sense | AGCCACAAAAUCCACAGCA | 2286 |
| | Strand | | |
| SNCA-894 | 19mer Anti-Sense | AAGCCACAAAAUCCACAGC | 2287 |
| | Strand | | |
| SNCA-895 | 19mer Anti-Sense | GAAGCCACAAAAUCCACAG | 2288 |
| | Strand | | |
| SNCA-897 | 19mer Anti-Sense | UUGAAGCCACAAAAUCCAC | 2289 |
| | Strand | | |
| SNCA-898 | 19mer Anti-Sense | AUUGAAGCCACAAAAUCCA | 2290 |
| | Strand | | |
| SNCA-900 | 19mer Anti-Sense | AGAUUGAAGCCACAAAAUC | 2291 |
| | Strand | | |
| SNCA-901 | 19mer Anti-Sense | UAGAUUGAAGCCACAAAAU | 2292 |
| | Strand | | |
| SNCA-956 | 19mer Anti-Sense | AGGAUUUAGAAAUAAGUGG | 2293 |
| | Strand | | |
| SNCA-957 | 19mer Anti-Sense | GAGGAUUUAGAAAUAAGUG | 2294 |
| | Strand | | |
| SNCA-958 | 19mer Anti-Sense | UGAGGAUUUAGAAAUAAGU | 2295 |
| | Strand | | |
| SNCA-959 | 19mer Anti-Sense | GUGAGGAUUUAGAAAUAAG | 2296 |
| | Strand | | |
| SNCA-961 | 19mer Anti-Sense | UAGUGAGGAUUUAGAAAUA | 2297 |
| | Strand | | |
| SNCA-962 | 19mer Anti-Sense | AUAGUGAGGAUUUAGAAAU | 2298 |
| | Strand | | |
| SNCA-963 | 19mer Anti-Sense | AAUAGUGAGGAUUUAGAAA | 2299 |
| | Strand | | |
| SNCA-964 | 19mer Anti-Sense | AAAUAGUGAGGAUUUAGAA | 2300 |
| | Strand | | |
| SNCA-965 | 19mer Anti-Sense | AAAAUAGUGAGGAUUUAGA | 2301 |
| | Strand | | |
| SNCA-966 | 19mer Anti-Sense | AAAAAUAGUGAGGAUUUAG | 2302 |
| | Strand | | |
| SNCA-967 | 19mer Anti-Sense | AAAAAAUAGUGAGGAUUUA | 2303 |
| | Strand | | |
| SNCA-968 | 19mer Anti-Sense | AAAAAAAUAGUGAGGAUUU | 2304 |
| | Strand | | |
| SNCA-969 | 19mer Anti-Sense | CAAAAAAAUAGUGAGGAUU | 2305 |
| | Strand | | |
| SNCA-970 | 19mer Anti-Sense | ACAAAAAAAUAGUGAGGAU | 2306 |
| | Strand | | |
| SNCA-971 | 19mer Anti-Sense | AACAAAAAAAUAGUGAGGA | 2307 |
| | Strand | | |
| SNCA-972 | 19mer Anti-Sense | CAACAAAAAAAUAGUGAGG | 2308 |
| | Strand | | |
| SNCA-973 | 19mer Anti-Sense | GCAACAAAAAAAUAGUGAG | 2309 |
| | Strand | | |
| SNCA-974 | 19mer Anti-Sense | AGCAACAAAAAAAUAGUGA | 2310 |
| | Strand | | |
| SNCA-975 | 19mer Anti-Sense | CAGCAACAAAAAAAUAGUG | 2311 |
| | Strand | | |
| SNCA-976 | 19mer Anti-Sense | ACAGCAACAAAAAAAUAGU | 2312 |
| | Strand | | |
| SNCA-977 | 19mer Anti-Sense | AACAGCAACAAAAAAAUAG | 2313 |
| | Strand | | |
| SNCA-978 | 19mer Anti-Sense | CAACAGCAACAAAAAAAUA | 2314 |
| | Strand | | |
| SNCA-979 | 19mer Anti-Sense | ACAACAGCAACAAAAAAAU | 2315 |
| | Strand | | |
| SNCA-980 | 19mer Anti-Sense | AACAACAGCAACAAAAAAA | 2316 |
| | Strand | | |
| SNCA-981 | 19mer Anti-Sense | GAACAACAGCAACAAAAAA | 2317 |
| | Strand | | |
| SNCA-982 | 19mer Anti-Sense | UGAACAACAGCAACAAAAA | 2318 |
| | Strand | | |
| SNCA-983 | 19mer Anti-Sense | CUGAACAACAGCAACAAAA | 2319 |
| | Strand | | |
| SNCA-984 | 19mer Anti-Sense | UCUGAACAACAGCAACAAA | 2320 |
| | Strand | | |
| SNCA-985 | 19mer Anti-Sense | UUCUGAACAACAGCAACAA | 2321 |
| | Strand | | |
| SNCA-986 | 19mer Anti-Sense | CUUCUGAACAACAGCAACA | 2322 |
| | Strand | | |
| SNCA-987 | 19mer Anti-Sense | ACUUCUGAACAACAGCAAC | 2323 |
| | Strand | | |
| SNCA-988 | 19mer Anti-Sense | AACUUCUGAACAACAGCAA | 2324 |
| | Strand | | |
| SNCA-989 | 19mer Anti-Sense | CAACUUCUGAACAACAGCA | 2325 |
| | Strand | | |
| SNCA-990 | 19mer Anti-Sense | ACAACUUCUGAACAACAGC | 2326 |
| | Strand | | |
| SNCA-991 | 19mer Anti-Sense | AACAACUUCUGAACAACAG | 2327 |
| | Strand | | |
| SNCA-992 | 19mer Anti-Sense | UAACAACUUCUGAACAACA | 2328 |
| | Strand | | |
| SNCA-993 | 19mer Anti-Sense | CUAACAACUUCUGAACAAC | 2329 |
| | Strand | | |
| SNCA-994 | 19mer Anti-Sense | ACUAACAACUUCUGAACAA | 2330 |
| | Strand | | |
| SNCA-995 | 19mer Anti-Sense | CACUAACAACUUCUGAACA | 2331 |
| | Strand | | |
| SNCA-996 | 19mer Anti-Sense | UCACUAACAACUUCUGAAC | 2332 |
| | Strand | | |
| SNCA-997 | 19mer Anti-Sense | AUCACUAACAACUUCUGAA | 2333 |
| | Strand | | |
| SNCA-998 | 19mer Anti-Sense | AAUCACUAACAACUUCUGA | 2334 |
| | Strand | | |
| SNCA-999 | 19mer Anti-Sense | AAAUCACUAACAACUUCUG | 2335 |
| | Strand | | |
| SNCA- | 19mer Anti-Sense | CAAAUCACUAACAACUUCU | 2336 |
| 1000 | Strand | | |
| SNCA- | 19mer Anti-Sense | GCAAAUCACUAACAACUUC | 2337 |
| 1001 | Strand | | |
| SNCA- | 19mer Anti-Sense | AGCAAAUCACUAACAACUU | 2338 |
| 1002 | Strand | | |
| SNCA- | 19mer Anti-Sense | UAGCAAAUCACUAACAACU | 2339 |
| 1003 | Strand | | |
| SNCA- | 19mer Anti-Sense | AUAGCAAAUCACUAACAAC | 2340 |
| 1004 | Strand | | |
| SNCA- | 19mer Anti-Sense | GAUAGCAAAUCACUAACAA | 2341 |
| 1005 | Strand | | |
| SNCA- | 19mer Anti-Sense | CACCUAAAAAUCUUAUAAU | 2342 |
| 1028 | Strand | | |
| SNCA- | 19mer Anti-Sense | ACACCUAAAAAUCUUAUAA | 2343 |
| 1029 | Strand | | |
| SNCA- | 19mer Anti-Sense | GACACCUAAAAAUCUUAUA | 2344 |
| 1030 | Strand | | |
| SNCA- | 19mer Anti-Sense | AGACACCUAAAAAUCUUAU | 2345 |
| 1031 | Strand | | |
| SNCA- | 19mer Anti-Sense | AAGACACCUAAAAAUCUUA | 2346 |
| 1032 | Strand | | |
| SNCA- | 19mer Anti-Sense | AAAGACACCUAAAAAUCUU | 2347 |
| 1033 | Strand | | |
| SNCA- | 19mer Anti-Sense | AAAAGACACCUAAAAAUCU | 2348 |
| 1034 | Strand | | |
| SNCA- | 19mer Anti-Sense | UAAAAGACACCUAAAAAUC | 2349 |
| 1035 | Strand | | |
| SNCA- | 19mer Anti-Sense | UUAAAAGACACCUAAAAAU | 2350 |
| 1036 | Strand | | |
| SNCA- | 19mer Anti-Sense | AUUAAAAGACACCUAAAAA | 2351 |
| 1037 | Strand | | |
| SNCA- | 19mer Anti-Sense | CAUUAAAAGACACCUAAAA | 2352 |
| 1038 | Strand | | |
| SNCA- | 19mer Anti-Sense | UCAUUAAAAGACACCUAAA | 2353 |
| 1039 | Strand | | |
| SNCA- | 19mer Anti-Sense | AUCAUUAAAAGACACCUAA | 2354 |
| 1040 | Strand | | |
| SNCA- | 19mer Anti-Sense | UAUCAUUAAAAGACACCUA | 2355 |
| 1041 | Strand | | |
| SNCA- | 19mer Anti-Sense | GUAUCAUUAAAAGACACCU | 2356 |
| 1042 | Strand | | |
| SNCA- | 19mer Anti-Sense | AGUAUCAUUAAAAGACACC | 2357 |
| 1043 | Strand | | |
| SNCA- | 19mer Anti-Sense | CAGUAUCAUUAAAAGACAC | 2358 |
| 1044 | Strand | | |
| SNCA- | 19mer Anti-Sense | ACAGUAUCAUUAAAAGACA | 2359 |
| 1045 | Strand | | |
| SNCA- | 19mer Anti-Sense | GACAGUAUCAUUAAAAGAC | 2360 |
| 1046 | Strand | | |
| SNCA- | 19mer Anti-Sense | AGACAGUAUCAUUAAAAGA | 2361 |
| 1047 | Strand | | |
| SNCA- | 19mer Anti-Sense | UAGACAGUAUCAUUAAAAG | 2362 |
| 1048 | Strand | | |
| SNCA- | 19mer Anti-Sense | UUAGACAGUAUCAUUAAAA | 2363 |
| 1049 | Strand | | |
| SNCA- | 19mer Anti-Sense | CUUAGACAGUAUCAUUAAA | 2364 |
| 1050 | Strand | | |
| SNCA- | 19mer Anti-Sense | UCUUAGACAGUAUCAUUAA | 2365 |
| 1051 | Strand | | |
| SNCA- | 19mer Anti-Sense | UUCUUAGACAGUAUCAUUA | 2366 |
| 1052 | Strand | | |
| SNCA- | 19mer Anti-Sense | AUUCUUAGACAGUAUCAUU | 2367 |
| 1053 | Strand | | |
| SNCA- | 19mer Anti-Sense | UAUUCUUAGACAGUAUCAU | 2368 |
| 1054 | Strand | | |
| SNCA- | 19mer Anti-Sense | UUAUUCUUAGACAGUAUCA | 2369 |
| 1055 | Strand | | |
| SNCA- | 19mer Anti-Sense | AUUAUUCUUAGACAGUAUC | 2370 |
| 1056 | Strand | | |
| SNCA- | 19mer Anti-Sense | CAUUAUUCUUAGACAGUAU | 2371 |
| 1057 | Strand | | |
| SNCA- | 19mer Anti-Sense | UCAUUAUUCUUAGACAGUA | 2372 |
| 1058 | Strand | | |
| SNCA- | 19mer Anti-Sense | UUAACAAAUUUCACAAUAC | 2373 |
| 1078 | Strand | | |
| SNCA- | 19mer Anti-Sense | AUUAACAAAUUUCACAAUA | 2374 |
| 1079 | Strand | | |
| SNCA- | 19mer Anti-Sense | UAUUAACAAAUUUCACAAU | 2375 |
| 1080 | Strand | | |
| SNCA- | 19mer Anti-Sense | UAUAUAUAUUAACAAAUUU | 2376 |
| 1086 | Strand | | |
| SNCA- | 19mer Anti-Sense | UUAUAUAUAUUAACAAAUU | 2377 |
| 1087 | Strand | | |
| SNCA- | 19mer Anti-Sense | AUUAUAUAUAUUAACAAAU | 2378 |
| 1088 | Strand | | |
| SNCA- | 19mer Anti-Sense | UAUUAUAUAUAUUAACAAA | 2379 |
| 1089 | Strand | | |
| SNCA- | 19mer Anti-Sense | GUAUUAUAUAUAUUAACAA | 2380 |
| 1090 | Strand | | |
| SNCA- | 19mer Anti-Sense | AGUAUUAUAUAUAUUAACA | 2381 |
| 1091 | Strand | | |
| SNCA- | 19mer Anti-Sense | AAGUAUUAUAUAUAUUAAC | 2382 |
| 1092 | Strand | | |
| SNCA- | 19mer Anti-Sense | UAAGUAUUAUAUAUAUUAA | 2383 |
| 1093 | Strand | | |
| SNCA- | 19mer Anti-Sense | AUAGUUUCAUGCUCACAUA | 2384 |
| 1116 | Strand | | |
| SNCA- | 19mer Anti-Sense | CAUAGUUUCAUGCUCACAU | 2385 |
| 1117 | Strand | | |
| SNCA- | 19mer Anti-Sense | UGCAUAGUUUCAUGCUCAC | 2386 |
| 1119 | Strand | | |
| SNCA- | 19mer Anti-Sense | GUGCAUAGUUUCAUGCUCA | 2387 |
| 1120 | Strand | | |
| SNCA- | 19mer Anti-Sense | GGUGCAUAGUUUCAUGCUC | 2388 |
| 1121 | Strand | | |
| SNCA- | 19mer Anti-Sense | AGGUGCAUAGUUUCAUGCU | 2389 |
| 1122 | Strand | | |
| SNCA- | 19mer Anti-Sense | UAGGUGCAUAGUUUCAUGC | 2390 |
| 1123 | Strand | | |
| SNCA- | 19mer Anti-Sense | AUAGGUGCAUAGUUUCAUG | 2391 |
| 1124 | Strand | | |
| SNCA- | 19mer Anti-Sense | UAUAGGUGCAUAGUUUCAU | 2392 |
| 1125 | Strand | | |
| SNCA- | 19mer Anti-Sense | UUAUAGGUGCAUAGUUUCA | 2393 |
| 1126 | Strand | | |
| SNCA- | 19mer Anti-Sense | UUUAUAGGUGCAUAGUUUC | 2394 |
| 1127 | Strand | | |
| SNCA- | 19mer Anti-Sense | AUUUAUAGGUGCAUAGUUU | 2395 |
| 1128 | Strand | | |
| SNCA- | 19mer Anti-Sense | UAUUUAUAGGUGCAUAGUU | 2396 |
| 1129 | Strand | | |
| SNCA- | 19mer Anti-Sense | GUAUUUAUAGGUGCAUAGU | 2397 |
| 1130 | Strand | | |
| SNCA- | 19mer Anti-Sense | AGUAUUUAUAGGUGCAUAG | 2398 |
| 1131 | Strand | | |
| SNCA- | 19mer Anti-Sense | UAGUAUUUAUAGGUGCAUA | 2399 |
| 1132 | Strand | | |
| SNCA- | 19mer Anti-Sense | UUAGUAUUUAUAGGUGCAU | 2400 |
| 1133 | Strand | | |
| SNCA- | 19mer Anti-Sense | UCACCAUUUAUAUACAAAC | 2401 |
| 1194 | Strand | | |
| SNCA- | 19mer Anti-Sense | CUCACCAUUUAUAUACAAA | 2402 |
| 1195 | Strand | | |
| SNCA- | 19mer Anti-Sense | UCUCACCAUUUAUAUACAA | 2403 |
| 1196 | Strand | | |
| SNCA- | 19mer Anti-Sense | UUCUCACCAUUUAUAUACA | 2404 |
| 1197 | Strand | | |
| SNCA- | 19mer Anti-Sense | AUUCUCACCAUUUAUAUAC | 2405 |
| 1198 | Strand | | |
| SNCA- | 19mer Anti-Sense | AAUUCUCACCAUUUAUAUA | 2406 |
| 1199 | Strand | | |
| SNCA- | 19mer Anti-Sense | UAAUUCUCACCAUUUAUAU | 2407 |
| 1200 | Strand | | |
| SNCA- | 19mer Anti-Sense | UUAAUUCUCACCAUUUAUA | 2408 |
| 1201 | Strand | | |
| SNCA- | 19mer Anti-Sense | UUUAAUUCUCACCAUUUAU | 2409 |
| 1202 | Strand | | |
| SNCA- | 19mer Anti-Sense | UUUUAAUUCUCACCAUUUA | 2410 |
| 1203 | Strand | | |
| SNCA- | 19mer Anti-Sense | AUUUUAAUUCUCACCAUUU | 2411 |
| 1204 | Strand | | |
| SNCA- | 19mer Anti-Sense | UAUUUUAAUUCUCACCAUU | 2412 |
| 1205 | Strand | | |
| SNCA- | 19mer Anti-Sense | UUAUUUUAAUUCUCACCAU | 2413 |
| 1206 | Strand | | |
| SNCA- | 19mer Anti-Sense | UUUAUUUUAAUUCUCACCA | 2414 |
| 1207 | Strand | | |
| SNCA- | 19mer Anti-Sense | UUUUAUUUUAAUUCUCACC | 2415 |
| 1208 | Strand | | |
| SNCA- | 19mer Anti-Sense | UGAGAUGGGAUAAAAAUAA | 2416 |
| 1250 | Strand | | |
| SNCA- | 19mer Anti-Sense | AGUGAGAUGGGAUAAAAAU | 2417 |
| 1252 | Strand | | |
| SNCA- | 19mer Anti-Sense | AAGUGAGAUGGGAUAAAAA | 2418 |
| 1253 | Strand | | |
| SNCA- | 19mer Anti-Sense | AAAGUGAGAUGGGAUAAAA | 2419 |
| 1254 | Strand | | |
| SNCA- | 19mer Anti-Sense | UAAAGUGAGAUGGGAUAAA | 2420 |
| 1255 | Strand | | |
| SNCA- | 19mer Anti-Sense | UUAAAGUGAGAUGGGAUAA | 2421 |
| 1256 | Strand | | |
| SNCA- | 19mer Anti-Sense | AUUAAAGUGAGAUGGGAUA | 2422 |
| 1257 | Strand | | |
| SNCA- | 19mer Anti-Sense | UAUUAAAGUGAGAUGGGAU | 2423 |
| 1258 | Strand | | |
| SNCA- | 19mer Anti-Sense | UUAUUAAAGUGAGAUGGGA | 2424 |
| 1259 | Strand | | |
| SNCA- | 19mer Anti-Sense | AUUAUUAAAGUGAGAUGGG | 2425 |
| 1260 | Strand | | |
| SNCA- | 19mer Anti-Sense | UAUUAUUAAAGUGAGAUGG | 2426 |
| 1261 | Strand | | |
| SNCA- | 19mer Anti-Sense | UUAUUAUUAAAGUGAGAUG | 2427 |
| 1262 | Strand | | |
| SNCA- | 19mer Anti-Sense | UUUAUUAUUAAAGUGAGAU | 2428 |
| 1263 | Strand | | |
| SNCA- | 19mer Anti-Sense | UUUUAUUAUUAAAGUGAGA | 2429 |
| 1264 | Strand | | |
| SNCA- | 19mer Anti-Sense | UUUUUAUUAUUAAAGUGAG | 2430 |
| 1265 | Strand | | |
| SNCA- | 19mer Anti-Sense | AUUUUUAUUAUUAAAGUGA | 2431 |
| 1266 | Strand | | |
| SNCA- | 19mer Anti-Sense | GAUUUUUAUUAUUAAAGUG | 2432 |
| 1267 | Strand | | |
| SNCA- | 19mer Anti-Sense | AAUUCCUCCUUCUUCAAAU | 2433 |
| 1351 | Strand | | |
| SNCA- | 19mer Anti-Sense | UCUACCUCUUCUAAAAUUC | 2434 |
| 1365 | Strand | | |
| SNCA- | 19mer Anti-Sense | CAUUUUCUCUACCUCUUCU | 2435 |
| 1372 | Strand | | |
| SNCA- | 19mer Anti-Sense | CCAUUUUCUCUACCUCUUC | 2436 |
| 1373 | Strand | | |
| SNCA- | 19mer Anti-Sense | UCCAUUUUCUCUACCUCUU | 2437 |
| 1374 | Strand | | |
| SNCA- | 19mer Anti-Sense | UUCCAUUUUCUCUACCUCU | 2438 |
| 1375 | Strand | | |
| SNCA- | 19mer Anti-Sense | GUUCCAUUUUCUCUACCUC | 2439 |
| 1376 | Strand | | |
| SNCA- | 19mer Anti-Sense | UGUUCCAUUUUCUCUACCU | 2440 |
| 1377 | Strand | | |
| SNCA- | 19mer Anti-Sense | AAUGUUCCAUUUUCUCUAC | 2441 |
| 1379 | Strand | | |
| SNCA- | 19mer Anti-Sense | UAAUGUUCCAUUUUCUCUA | 2442 |
| 1380 | Strand | | |
| SNCA- | 19mer Anti-Sense | UUAAUGUUCCAUUUUCUCU | 2443 |
| 1381 | Strand | | |
| SNCA- | 19mer Anti-Sense | GUUAAUGUUCCAUUUUCUC | 2444 |
| 1382 | Strand | | |
| SNCA- | 19mer Anti-Sense | GGUUAAUGUUCCAUUUUCU | 2445 |
| 1383 | Strand | | |
| SNCA- | 19mer Anti-Sense | GGGUUAAUGUUCCAUUUUC | 2446 |
| 1384 | Strand | | |
| SNCA- | 19mer Anti-Sense | AGGGUUAAUGUUCCAUUUU | 2447 |
| 1385 | Strand | | |
| SNCA- | 19mer Anti-Sense | UGUAGGGUUAAUGUUCCAU | 2448 |
| 1388 | Strand | | |
| SNCA- | 19mer Anti-Sense | AAAACACACUUCUGGCAGU | 2449 |
| 1428 | Strand | | |
| SNCA- | 19mer Anti-Sense | CAAAACACACUUCUGGCAG | 2450 |
| 1429 | Strand | | |
| Forward | qPCR primer | AGGGTGTTCTCTATGTAGGCT | 2451 |
| Primer | | | |
| Reverse | qPCR primer | ACTGCTCCTCCAACATTTGTC | 2452 |
| Primer | | | |
| Probe | qPCR probe | TGCTCTTTG/ZEN/GTCTTCTCAGCCACT | 2453 |
| | | G | |
| Forward | SYBR Assay | ACAGTGGCTGAGAAGACCAA | 2454 |
| Primer | | | |
| Reverse | SYBR Assay | CTCCCTCCACTGTCTTCTGG | 2455 |
| Primer | | | |
| Probe | SYBR Assay | ACCCGTCACCACCGCTCCTCC | 2456 |

The application's sequence listing, which the Patent Office published only in electronic form, follows.

SEQUENCE LISTING (2457 sequences)

SEQ ID NO: 1 - RNA, 25 nt, synthetic construct
  source 1..25: mol_type = other RNA
ttcatgaaaggactttcaaaggcca

SEQ ID NO: 2 - RNA, 25 nt, synthetic construct
  source 1..25: mol_type = other RNA
tcatgaaaggactttcaaaagccaa

SEQ ID NO: 3 - RNA, 25 nt, synthetic construct
  source 1..25: mol_type = other RNA
catgaaaggactttcaaagaccaag

SEQ ID NO: 4 - RNA, 25 nt, synthetic construct
  source 1..25: mol_type = other RNA
atgaaaggactttcaaaggacaagg

SEQ ID NO: 5 - RNA, 25 nt, synthetic construct
  source 1..25: mol_type = other RNA
tgaaaggactttcaaaggcaaagga

SEQ ID NO: 6 - RNA, 25 nt, synthetic construct
  source 1..25: mol_type = other RNA
gaaaggactttcaaaggccaaggag

SEQ ID NO: 7 - RNA, 25 nt, synthetic construct
  source 1..25: mol_type = other RNA
ggagggagttgtggctgctactgag

SEQ ID NO: 8 - RNA, 25 nt, synthetic construct
  source 1..25: mol_type = other RNA
gggagttgtggctgctgctaagaaa

SEQ ID NO: 9 - RNA, 25 nt, synthetic construct
  source 1..25: mol_type = other RNA
ggagttgtggctgctgctgagaaaa

SEQ ID NO: 10 - RNA, 25 nt, synthetic construct
  source 1..25: mol_type = other RNA
gagttgtggctgctgctgaaaaaac

SEQ ID NO: 11 - RNA, 25 nt, synthetic construct
  source 1..25: mol_type = other RNA
gttgtggctgctgctgagaaaacca

SEQ ID NO: 12 - RNA, 25 nt, synthetic construct
  source 1..25: mol_type = other RNA
ttgtggctgctgctgagaaaaccaa

SEQ ID NO: 13 - RNA, 25 nt, synthetic construct
  source 1..25: mol_type = other RNA
tgtggctgctgctgagaaaaccaaa

SEQ ID NO: 14 - RNA, 25 nt, synthetic construct
  source 1..25: mol_type = other RNA
gtggctgctgctgagaaaaacaaac

SEQ ID NO: 15 - RNA, 25 nt, synthetic construct
  source 1..25: mol_type = other RNA
tggctgctgctgagaaaacaaaaca

SEQ ID NO: 16 - RNA, 25 nt, synthetic construct
  source 1..25: mol_type = other RNA
ggctgctgctgagaaaaccaaacag

SEQ ID NO: 17 - RNA, 25 nt, synthetic construct
  source 1..25: mol_type = other RNA
caacagtggctgagaagacaaaaga

SEQ ID NO: 18 - RNA, 25 nt, synthetic construct
  source 1..25: mol_type = other RNA
aacagtggctgagaagaccaaagag

SEQ ID NO: 19 - RNA, 25 nt, synthetic construct
  source 1..25: mol_type = other RNA
acagtggctgagaagaccaaagagc

SEQ ID NO: 20 - RNA, 25 nt, synthetic construct
  source 1..25: mol_type = other RNA
cagtggctgagaagaccaaagagca

SEQ ID NO: 21 - RNA, 25 nt, synthetic construct
  source 1..25: mol_type = other RNA
agtggctgagaagaccaaaaagcaa

SEQ ID NO: 22 - RNA, 25 nt, synthetic construct
  source 1..25: mol_type = other RNA
gtggctgagaagaccaaagagcaag

SEQ ID NO: 23 - DNA, 25 bp, synthetic construct
  source 1..25: mol_type = other DNA
  misc_feature 1..24: note = RNA
  misc_feature 25: note = DNA
tggctgagaagaccaaagaacaagt

SEQ ID NO: 24 - DNA, 25 bp, synthetic construct
  source 1..25: mol_type = other DNA
  misc_feature 1..23: note = RNA
  misc_feature 24: note = DNA
  misc_feature 25: note = RNA
ggctgagaagaccaaagagaaagtg

SEQ ID NO: 25 - RNA, 25 nt, synthetic construct
  source 1..25: mol_type = other RNA
gctgagaagaccaaagagcaagtga

SEQ ID NO: 26 - RNA, 25 nt, synthetic construct
  source 1..25: mol_type = other RNA
ctgagaagaccaaagagcaagtgac

SEQ ID NO: 27 - RNA, 25 nt, synthetic construct
  source 1..25: mol_type = other RNA
tgagaagaccaaagagcaaatgaca

SEQ ID NO: 28 - RNA, 25 nt, synthetic construct
  source 1..25: mol_type = other RNA
gagaagaccaaagagcaagagacaa

SEQ ID NO: 29 - RNA, 25 nt, synthetic construct
  source 1..25: mol_type = other RNA
agaagaccaaagagcaagtaacaaa

SEQ ID NO: 30 - DNA, 25 bp, synthetic construct
  source 1..25: mol_type = other DNA
  misc_feature 1..24: note = RNA
  misc_feature 25: note = DNA
gaagaccaaagagcaagtgacaaat

SEQ ID NO: 31 - DNA, 25 bp, synthetic construct
  source 1..25: mol_type = other DNA
  misc_feature 1..23: note = RNA
  misc_feature 24: note = DNA
  misc_feature 25: note = RNA
aagaccaaagagcaagtgaaaaatg

SEQ ID NO: 32 - DNA, 25 bp, synthetic construct
  source 1..25: mol_type = other DNA
  misc_feature 1..24: note = RNA
  misc_feature 25: note = DNA
agaccaaagagcaagtgacaaatgt

SEQ ID NO: 33 - DNA, 25 bp, synthetic construct
  source 1..25: mol_type = other DNA
  misc_feature 1..23: note = RNA
  misc_feature 24..25: note = DNA
gaccaaagagcaagtgacaaatgtt

SEQ ID NO: 34 - DNA, 25 bp, synthetic construct
  source 1..25: mol_type = other DNA
  misc_feature 1..23: note = RNA
  misc_feature 24: note = DNA
  misc_feature 25: note = RNA
accaaagagcaagtgacaaatgttg

SEQ ID NO: 35 - RNA, 25 nt, synthetic construct
  source 1..25: mol_type = other RNA
ccaaagagcaagtgacaaaagttgg

SEQ ID NO: 36 - RNA, 25 nt, synthetic construct
  source 1..25: mol_type = other RNA
caaagagcaagtgacaaatattgga

SEQ ID NO: 37 - RNA, 25 nt, synthetic construct
  source 1..25: mol_type = other RNA
aaagagcaagtgacaaatgatggag

SEQ ID NO: 38 - RNA, 25 nt, synthetic construct
  source 1..25: mol_type = other RNA
aagagcaagtgacaaatgtaggagg

SEQ ID NO: 39 - RNA, 25 nt, synthetic construct
  source 1..25: mol_type = other RNA
agagcaagtgacaaatgttagagga

SEQ ID NO: 40 - RNA, 25 nt, synthetic construct
  source 1..25: mol_type = other RNA
gagcaagtgacaaatgttgaaggag

SEQ ID NO: 41 - RNA, 25 nt, synthetic construct
  source 1..25: mol_type = other RNA
agcaagtgacaaatgttggaggagc

SEQ ID NO: 42 - RNA, 25 nt, synthetic construct
  source 1..25: mol_type = other RNA
gcaagtgacaaatgttggaagagca

SEQ ID NO: 43 - RNA, 25 nt, synthetic construct
  source 1..25: mol_type = other RNA
caagtgacaaatgttggagaagcag

SEQ ID NO: 44 - DNA, 25 bp, synthetic construct
  source 1..25: mol_type = other DNA
  misc_feature 1..24: note = RNA
  misc_feature 25: note = DNA
aagtgacaaatgttggaggagcagt

SEQ ID NO: 45 - DNA, 25 bp, synthetic construct
  source 1..25: mol_type = other DNA
  misc_feature 1..23: note = RNA
  misc_feature 24: note = DNA
  misc_feature 25: note = RNA
agtgacaaatgttggaggaacagtg

SEQ ID NO: 46 - RNA, 25 nt, synthetic construct
  source 1..25: mol_type = other RNA
gtgacaaatgttggaggagaagtgg

SEQ ID NO: 47 - DNA, 25 bp, synthetic construct
  source 1..25: mol_type = other DNA
  misc_feature 1..24: note = RNA
  misc_feature 25: note = DNA
tgacaaatgttggaggagcagtggt

SEQ ID NO: 48 - RNA, 25 nt, synthetic construct
  source 1..25: mol_type = other RNA
gtacaagtgctcagttccaatgtgc

SEQ ID NO: 49 - RNA, 25 nt, synthetic construct
  source 1..25: mol_type = other RNA
tacaagtgctcagttccaaagtgcc

SEQ ID NO: 50 - RNA, 25 nt, synthetic construct
  source 1..25: mol_type = other RNA
acaagtgctcagttccaatatgccc

SEQ ID NO: 51 - RNA, 25 nt, synthetic construct
  source 1..25: mol_type = other RNA
caagtgctcagttccaatgagccca

SEQ ID NO: 52 - RNA, 25 nt, synthetic construct
  source 1..25: mol_type = other RNA
aagtgctcagttccaatgtacccag

SEQ ID NO: 53 - DNA, 25 bp, synthetic construct
  source 1..25: mol_type = other DNA
  misc_feature 1..24: note = RNA
  misc_feature 25: note = DNA
agtgctcagttccaatgtgaccagt

SEQ ID NO: 54 - DNA, 25 bp, synthetic construct
  source 1..25: mol_type = other DNA
  misc_feature 1..23: note = RNA
  misc_feature 24: note = DNA
  misc_feature 25: note = RNA
gtgctcagttccaatgtgcacagtc

SEQ ID NO: 55 - RNA, 25 nt, synthetic construct
  source 1..25: mol_type = other RNA
tgctcagttccaatgtgccaagtca

SEQ ID NO: 56 - DNA, 25 bp, synthetic construct
  source 1..25: mol_type = other DNA
  misc_feature 1..24: note = RNA
  misc_feature 25: note = DNA
gctcagttccaatgtgcccagtcat

SEQ ID NO: 57 - DNA, 25 bp, synthetic construct
  source 1..25: mol_type = other DNA
  misc_feature 1..23: note = RNA
  misc_feature 24: note = DNA
  misc_feature 25: note = RNA
ctcagttccaatgtgcccaatcatg

SEQ ID NO: 58 - RNA, 25 nt, synthetic construct
  source 1..25: mol_type = other RNA
tcagttccaatgtgcccagacatga

SEQ ID NO: 59 - RNA, 25 nt, synthetic construct
  source 1..25: mol_type = other RNA
cagttccaatgtgcccagtaatgac

SEQ ID NO: 60 - RNA, 25 nt, synthetic construct
  source 1..25: mol_type = other RNA
agttccaatgtgcccagtcatgaca

SEQ ID NO: 61 - DNA, 25 bp, synthetic construct
  source 1..25: mol_type = other DNA
  misc_feature 1..24: note = RNA
  misc_feature 25: note = DNA
gttccaatgtgcccagtcaagacat

SEQ ID NO: 62 - DNA, 25 bp, synthetic construct
  source 1..25: mol_type = other DNA
  misc_feature 1..23: note = RNA
  misc_feature 24..25: note = DNA
ttccaatgtgcccagtcataacatt

SEQ ID NO: 63 - DNA, 25 bp, synthetic construct
  source 1..25: mol_type = other DNA
  misc_feature 1..23: note = RNA
  misc_feature 24..25: note = DNA
tccaatgtgcccagtcatgacattt

SEQ ID NO: 64 - DNA, 25 bp, synthetic construct
  source 1..25: mol_type = other DNA
  misc_feature 1..23: note = RNA
  misc_feature 24: note = DNA
  misc_feature 25: note = RNA
ccaatgtgcccagtcatgaaatttc

SEQ ID NO: 65 - DNA, 25 bp, synthetic construct
  source 1..25: mol_type = other DNA
  misc_feature 1..24: note = RNA
  misc_feature 25: note = DNA
caatgtgcccagtcatgacatttct

SEQ ID NO: 66 - RNA, 25 nt, synthetic construct
  source 1..25: mol_type = other RNA
aagtcttccatcagcagtgattgaa

SEQ ID NO: 67 - RNA, 25 nt, synthetic construct
  source 1..25: mol_type = other RNA
agtcttccatcagcagtgaatgaag

SEQ ID NO: 68 - DNA, 25 bp, synthetic construct
  source 1..25: mol_type = other DNA
  misc_feature 1..24: note = RNA
  misc_feature 25: note = DNA
gtcttccatcagcagtgatagaagt

SEQ ID NO: 69 - DNA, 25 bp, synthetic construct
  source 1..25: mol_type = other DNA
  misc_feature 1..23: note = RNA
  misc_feature 24: note = DNA
  misc_feature 25: note = RNA
aaaacacctaagtgactacaactta

SEQ ID NO: 70 - DNA, 25 bp, synthetic construct
  source 1..25: mol_type = other DNA
  misc_feature 1..24: note = RNA
  misc_feature 25: note = DNA
aaacacctaagtgactaccacttat

SEQ ID NO: 71 - DNA, 25 bp, synthetic construct
  source 1..25: mol_type = other DNA
  misc_feature 1..23: note = RNA
  misc_feature 24..25: note = DNA
aacacctaagtgactaccaattatt

SEQ ID NO: 72 - DNA, 25 bp, synthetic construct
  source 1..25: mol_type = other DNA
  misc_feature 1..23: note = RNA
  misc_feature 24..25: note = DNA
acacctaagtgactaccacatattt

SEQ ID NO: 73 - DNA, 25 bp, synthetic construct
  source 1..25: mol_type = other DNA
  misc_feature 1..23: note = RNA
  misc_feature 24: note = DNA
  misc_feature 25: note = RNA
cacctaagtgactaccactaatttc

SEQ ID NO: 74 - DNA, 25 bp, synthetic construct
  source 1..25: mol_type = other DNA
  misc_feature 1..24: note = RNA
  misc_feature 25: note = DNA
acctaagtgactaccacttatttct

SEQ ID NO: 75 - DNA, 25 bp, synthetic construct
  source 1..25: mol_type = other DNA
  misc_feature 1..23: note = RNA
  misc_feature 24: note = DNA
  misc_feature 25: note = RNA
cctaagtgactaccacttaattcta

SEQ ID NO: 76 - RNA, 25 nt, synthetic construct
  source 1..25: mol_type = other RNA
ctaagtgactaccacttatatctaa

SEQ ID NO: 77 - RNA, 25 nt, synthetic construct
  source 1..25: mol_type = other RNA
taagtgactaccacttattactaaa

SEQ ID NO: 78 - DNA, 25 bp, synthetic construct
  source 1..25: mol_type = other DNA
  misc_feature 1..24: note = RNA
  misc_feature 25: note = DNA
aagtgactaccacttatttataaat

SEQ ID NO: 79 - DNA, 25 bp, synthetic construct
  source 1..25: mol_type = other DNA
  misc_feature 1..23: note = RNA
  misc_feature 24: note = DNA
  misc_feature 25: note = RNA
agtgactaccacttatttcaaaatc

SEQ ID NO: 80 - RNA, 25 nt, synthetic construct
  source 1..25: mol_type = other RNA
gtgactaccacttatttctaaatcc

SEQ ID NO: 81 - DNA, 25 bp, synthetic construct
  source 1..25: mol_type = other DNA
  misc_feature 1..24: note = RNA
  misc_feature 25: note = DNA
tgactaccacttatttctaaatcct

SEQ ID NO: 82 - DNA, 25 bp, synthetic construct
  source 1..25: mol_type = other DNA
  misc_feature 1..23: note = RNA
  misc_feature 24: note = DNA
  misc_feature 25: note = RNA
gactaccacttatttctaaatcctc

SEQ ID NO: 83 - RNA, 25 nt, synthetic construct
  source 1..25: mol_type = other RNA
actaccacttatttctaaaacctca

SEQ ID NO: 84 - RNA, 25 nt, synthetic construct
  source 1..25: mol_type = other RNA
ctaccacttatttctaaatactcac

SEQ ID NO: 85 - DNA, 25 bp, synthetic construct
  source 1..25: mol_type = other DNA
  misc_feature 1..24: note = RNA
  misc_feature 25: note = DNA
taccacttatttctaaatcatcact

SEQ ID NO: 86 - RNA, 25 nt, synthetic construct
  source 1..25: mol_type = other RNA
ttgtgaaatttgttaatatatataa

SEQ ID NO: 87 - DNA, 25 bp, synthetic construct
  source 1..25: mol_type = other DNA
  misc_feature 1..24: note = RNA
  misc_feature 25: note = DNA
tgtgaaatttgttaatataaataat

SEQ ID NO: 88 - DNA, 25 bp, synthetic construct
  source 1..25: mol_type = other DNA
  misc_feature 1..23: note = RNA
  misc_feature 24: note = DNA
  misc_feature 25: note = RNA
gtgaaatttgttaatatatataata

SEQ ID NO: 89 - RNA, 25 nt, synthetic construct
  source 1..25: mol_type = other RNA
tgaaatttgttaatatataaaatac

SEQ ID NO: 90 - DNA, 25 bp, synthetic construct
  source 1..25: mol_type = other DNA
  misc_feature 1..24: note = RNA
  misc_feature 25: note = DNA
gaaatttgttaatatatataatact

SEQ ID NO: 91 - RNA, 25 nt, synthetic construct
  source 1..25: mol_type = other RNA
acttgtgtttgtatataaaaggtga

SEQ ID NO: 92 - RNA, 25 nt, synthetic construct
  source 1..25: mol_type = other RNA
cttgtgtttgtatataaatagtgag

SEQ ID NO: 93 - RNA, 25 nt, synthetic construct
  source 1..25: mol_type = other RNA
ttgtgtttgtatataaatgatgaga

SEQ ID NO: 94 - RNA, 25 nt, synthetic construct
  source 1..25: mol_type = other RNA
tgtgtttgtatataaatggagagaa

SEQ ID NO: 95 - DNA, 25 bp, synthetic construct
  source 1..25: mol_type = other DNA
  misc_feature 1..24: note = RNA
  misc_feature 25: note = DNA
gtgtttgtatataaatggtaagaat

SEQ ID NO: 96 - DNA, 25 bp, synthetic construct
  source 1..25: mol_type = other DNA
  misc_feature 1..23: note = RNA
  misc_feature 24..25: note = DNA
tgtttgtatataaatggtgagaatt

SEQ ID NO: 97 - RNA, 25 nt, synthetic construct
  source 1..25: mol_type = other RNA
tgtggtgtaaaggaattcaatagcc

SEQ ID NO: 98 - RNA, 25 nt, synthetic construct
  source 1..25: mol_type = other RNA
gtggtgtaaaggaattcataagcca

SEQ ID NO: 99 - DNA, 25 bp, synthetic construct
  source 1..25: mol_type = other DNA
  misc_feature 1..24: note = RNA
  misc_feature 25: note = DNA
tggtgtaaaggaattcattagccat

SEQ ID NO: 100 - DNA, 25 bp, synthetic construct
  source 1..25: mol_type = other DNA
  misc_feature 1..23: note = RNA
  misc_feature 24: note = DNA
  misc_feature 25: note = RNA
ggtgtaaaggaattcattaaccatg

SEQ ID NO: 101 - RNA, 25 nt, synthetic construct
  source 1..25: mol_type = other RNA
gtgtaaaggaattcattagacatgg

SEQ ID NO: 102 - RNA, 25 nt, synthetic construct
  source 1..25: mol_type = other RNA
tgtaaaggaattcattagcaatgga

SEQ ID NO: 103 - DNA, 25 bp, synthetic construct
  source 1..25: mol_type = other DNA
  misc_feature 1..24: note = RNA
  misc_feature 25: note = DNA
gtaaaggaattcattagccatggat

SEQ ID NO: 104 - DNA, 25 bp, synthetic construct
  source 1..25: mol_type = other DNA
  misc_feature 1..23: note = RNA
  misc_feature 24: note = DNA
  misc_feature 25: note = RNA
taaaggaattcattagccaaggatg

SEQ ID NO: 105 - DNA, 25 bp, synthetic construct
  source 1..25: mol_type = other DNA
  misc_feature 1..24: note = RNA
  misc_feature 25: note = DNA
aaaggaattcattagccatagatgt

SEQ ID NO: 106 - DNA, 25 bp, synthetic construct
  source 1..25: mol_type = other DNA
  misc_feature 1..23: note = RNA
  misc_feature 24: note = DNA
  misc_feature 25: note = RNA
aaggaattcattagccatgaatgta

SEQ ID NO: 107 - DNA, 25 bp, synthetic construct
  source 1..25: mol_type = other DNA
  misc_feature 1..24: note = RNA
  misc_feature 25: note = DNA
aggaattcattagccatggatgtat

SEQ ID NO: 108 - DNA, 25 bp, synthetic construct
  source 1..25: mol_type = other DNA
  misc_feature 1..23: note = RNA
  misc_feature 24..25: note = DNA
ggaattcattagccatggaagtatt

SEQ ID NO: 109 - DNA, 25 bp, synthetic construct
  source 1..25: mol_type = other DNA
  misc_feature 1..23: note = RNA
  misc_feature 24: note = DNA
  misc_feature 25: note = RNA
gaattcattagccatggatatattc

SEQ ID NO: 110 - RNA, 25 nt, synthetic construct
  source 1..25: mol_type = other RNA
aattcattagccatggatgaattca

SEQ ID NO: 111 - DNA, 25 bp, synthetic construct
  source 1..25: mol_type = other DNA
  misc_feature 1..24: note = RNA
  misc_feature 25: note = DNA
attcattagccatggatgtattcat

SEQ ID NO: 112 - DNA, 25 bp, synthetic construct
  source 1..25: mol_type = other DNA
  misc_feature 1..23: note = RNA
  misc_feature 24: note = DNA
  misc_feature 25: note = RNA
ttcattagccatggatgtaatcatg

SEQ ID NO: 113 - RNA, 25 nt, synthetic construct
  source 1..25: mol_type = other RNA
tcattagccatggatgtatacatga

SEQ ID NO: 114 - RNA, 25 nt, synthetic construct
  source 1..25: mol_type = other RNA
cattagccatggatgtattaatgaa

SEQ ID NO: 115 - RNA, 25 nt, synthetic construct
  source 1..25: mol_type = other RNA
attagccatggatgtattcatgaaa

SEQ ID NO: 116 - RNA, 25 nt, synthetic construct
  source 1..25: mol_type = other RNA
ttagccatggatgtattcaagaaag

SEQ ID NO: 117 - RNA, 25 nt, synthetic construct
  source 1..25: mol_type = other RNA
tagccatggatgtattcataaaagg

SEQ ID NO: 118 - RNA, 25 nt, synthetic construct
  source 1..25: mol_type = other RNA
agccatggatgtattcatgaaagga

SEQ ID NO: 119 - RNA, 25 nt, synthetic construct
  source 1..25: mol_type = other RNA
gccatggatgtattcatgaaaggac

SEQ ID NO: 120 - DNA, 25 bp, synthetic construct
  source 1..25: mol_type = other DNA
  misc_feature 1..24: note = RNA
  misc_feature 25: note = DNA
ccatggatgtattcatgaaaggact

SEQ ID NO: 121 - DNA, 25 bp, synthetic construct
  source 1..25: mol_type = other DNA
  misc_feature 1..23: note = RNA
  misc_feature 24..25: note = DNA
catggatgtattcatgaaaagactt

SEQ ID NO: 122 - DNA, 25 bp, synthetic construct
  source 1..25: mol_type = other DNA
  misc_feature 1..23: note = RNA
  misc_feature 24..25: note = DNA
atggatgtattcatgaaagaacttt

SEQ ID NO: 123 - DNA, 25 bp, synthetic construct
  source 1..25: mol_type = other DNA
  misc_feature 1..23: note = RNA
  misc_feature 24: note = DNA
  misc_feature 25: note = RNA
tggatgtattcatgaaaggactttc

SEQ ID NO: 124 - RNA, 25 nt, synthetic construct
  source 1..25: mol_type = other RNA
ggatgtattcatgaaaggaatttca

SEQ ID NO: 125 - RNA, 25 nt, synthetic construct
  source 1..25: mol_type = other RNA
gatgtattcatgaaaggacattcaa

SEQ ID NO: 126 - RNA, 25 nt, synthetic construct
  source 1..25: mol_type = other RNA
atgtattcatgaaaggactatcaaa

SEQ ID NO: 127 - RNA, 25 nt, synthetic construct
  source 1..25: mol_type = other RNA
gtattcatgaaaggactttaaaagg

SEQ ID NO: 128 - RNA, 25 nt, synthetic construct
  source 1..25: mol_type = other RNA
agaagcagcaggaaagacaaaagag

SEQ ID NO: 129 - DNA, 25 bp, synthetic construct
  source 1..25: mol_type = other DNA
  misc_feature 1..24: note = RNA
  misc_feature 25: note = DNA
cagcaggaaagacaaaagaaggtgt

SEQ ID NO: 130 - DNA, 25 bp, synthetic construct
  source 1..25: mol_type = other DNA
  misc_feature 1..23: note = RNA
  misc_feature 24: note = DNA
  misc_feature 25: note = RNA
gcaggaaagacaaaagaggatgttc

SEQ ID NO: 131 - DNA, 25 bp, synthetic construct
  source 1..25: mol_type = other DNA
  misc_feature 1..23: note = RNA
  misc_feature 24: note = DNA
  misc_feature 25: note = RNA
gaaagacaaaagagggtgtactcta

SEQ ID NO: 132 - DNA, 25 bp, synthetic construct
  source 1..25: mol_type = other DNA
  misc_feature 1..24: note = RNA
  misc_feature 25: note = DNA
aaagacaaaagagggtgttatctat

SEQ ID NO: 133 - DNA, 25 bp, synthetic construct
  source 1..25: mol_type = other DNA
  misc_feature 1..24: note = RNA
  misc_feature 25: note = DNA
agacaaaagagggtgttctatatgt

SEQ ID NO: 134 - DNA, 25 bp, synthetic construct
  source 1..25: mol_type = other DNA
  misc_feature 1..23: note = RNA
  misc_feature 24: note = DNA
  misc_feature 25: note = RNA
gacaaaagagggtgttctcaatgta

SEQ ID NO: 135 - RNA, 25 nt, synthetic construct
  source 1..25: mol_type = other RNA
agagggtgttctctatgtaagctcc

SEQ ID NO: 136 - RNA, 25 nt, synthetic construct
  source 1..25: mol_type = other RNA
agggtgttctctatgtaggatccaa

SEQ ID NO: 137 - RNA, 25 nt, synthetic construct
  source 1..25: mol_type = other RNA
ggtgttctctatgtaggctacaaaa

SEQ ID NO: 138 - RNA, 25 nt, synthetic construct
  source 1..25: mol_type = other RNA
aggaagggtatcaagactaagaacc

SEQ ID NO: 139 - RNA, 25 nt, synthetic construct
  source 1..25: mol_type = other RNA
aagggtatcaagactacgaacctga

SEQ ID NO: 140 - RNA, 25 nt, synthetic construct
  source 1..25: mol_type = other RNA
agggtatcaagactacgaaactgaa

SEQ ID NO: 141 - DNA, 25 bp, synthetic construct
  source 1..25: mol_type = other DNA
  misc_feature 1..23: note = RNA
  misc_feature 24: note = DNA
  misc_feature 25: note = RNA
atcaagactacgaacctgaagccta

SEQ ID NO: 142 - RNA, 25 nt, synthetic construct
  source 1..25: mol_type = other RNA
tcaagactacgaacctgaaacctaa

SEQ ID NO: 143 - RNA, 25 nt, synthetic construct
  source 1..25: mol_type = other RNA
aagactacgaacctgaagcataaga

SEQ ID NO: 144 - RNA, 25 nt, synthetic construct
  source 1..25: mol_type = other RNA
gactacgaacctgaagcctaagaaa

SEQ ID NO: 145 - DNA, 25 bp, synthetic construct
  source 1..25: mol_type = other DNA
  misc_feature 1..24: note = RNA
  misc_feature 25: note = DNA
actacgaacctgaagcctaagaaat

SEQ ID NO: 146 - DNA, 25 bp, synthetic construct
  source 1..25: mol_type = other DNA
  misc_feature 1..23: note = RNA
  misc_feature 24: note = DNA
  misc_feature 25: note = RNA
ctacgaacctgaagcctaaaaaata

SEQ ID NO: 147 - DNA, 25 bp, synthetic construct
  source 1..25: mol_type = other DNA
  misc_feature 1..23: note = RNA
  misc_feature 24: note = DNA
  misc_feature 25: note = RNA
acgaacctgaagcctaagaaatatc

SEQ ID NO: 148 - DNA, 25 bp, synthetic construct
  source 1..25: mol_type = other DNA
  misc_feature 1..24: note = RNA
  misc_feature 25: note = DNA
cgaacctgaagcctaagaaatatct

SEQ ID NO: 149 - DNA, 25 bp, synthetic construct
  source 1..25: mol_type = other DNA
  misc_feature 1..23: note = RNA
  misc_feature 24..25: note = DNA
aacctgaagcctaagaaatatcttt

SEQ ID NO: 150 - DNA, 25 bp, synthetic construct
  source 1..25: mol_type = other DNA
  misc_feature 1..23: note = RNA
  misc_feature 24: note = DNA
  misc_feature 25: note = RNA
acctgaagcctaagaaataactttg

SEQ ID NO: 151 - RNA, 25 nt, synthetic construct
  source 1..25: mol_type = other RNA
cctgaagcctaagaaatatatttgc

SEQ ID NO: 152 - DNA, 25 bp, synthetic construct
  source 1..25: mol_type = other DNA
  misc_feature 1..24: note = RNA
  misc_feature 25: note = DNA
ctgaagcctaagaaatatcattgct

SEQ ID NO: 153 - DNA, 25 bp, synthetic construct
  source 1..25: mol_type = other DNA
  misc_feature 1..23: note = RNA
  misc_feature 24: note = DNA
  misc_feature 25: note = RNA
tgaagcctaagaaatatctatgctc

SEQ ID NO: 154 - DNA, 25 bp, synthetic construct
  source 1..25: mol_type = other DNA
  misc_feature 1..24: note = RNA
  misc_feature 25: note = DNA
cctaagaaatatctttgctaccagt

SEQ ID NO: 155 - DNA, 25 bp, synthetic construct
  source 1..25: mol_type = other DNA
  misc_feature 1..23: note = RNA
  misc_feature 24..25: note = DNA
ctaagaaatatctttgctcacagtt

SEQ ID NO: 156 - DNA, 25 bp, synthetic construct
  source 1..25: mol_type = other DNA
  misc_feature 1..24: note = RNA
  misc_feature 25: note = DNA
agaaatatctttgctcccaatttct

SEQ ID NO: 157 - RNA, 25 nt, synthetic construct
  source 1..25: mol_type = other RNA
aatatctttgctcccagttacttga

SEQ ID NO: 158 - RNA, 25 nt, synthetic construct
  source 1..25: mol_type = other RNA
atatctttgctcccagtttattgag

SEQ ID NO: 159 - RNA, 25 nt, synthetic construct
  source 1..25: mol_type = other RNA
cagtttcttgagatctgctaacaga

SEQ ID NO: 160 - DNA, 25 bp, synthetic construct
  source 1..25: mol_type = other DNA
  misc_feature 1..23: note = RNA
  misc_feature 24: note = DNA
  misc_feature 25: note = RNA
tgtacaagtgctcagttccaatgtg

SEQ ID NO: 161 - RNA, 25 nt, synthetic construct
  source 1..25: mol_type = other RNA
atgtgcccagtcatgacatatctca

SEQ ID NO: 162 - RNA, 25 nt, synthetic construct
  source 1..25: mol_type = other RNA
tgtgcccagtcatgacattactcaa

SEQ ID NO: 163 - RNA, 25 nt, synthetic construct
  source 1..25: mol_type = other RNA
gtgcccagtcatgacatttatcaaa

SEQ ID NO: 164 - DNA, 25 bp, synthetic construct
  source 1..25: mol_type = other DNA
  misc_feature 1..23: note = RNA
  misc_feature 24..25: note = DNA
cagtcatgacatttctcaaagtttt

SEQ ID NO: 165 - DNA, 25 bp, synthetic construct
  source 1..25: mol_type = other DNA
  misc_feature 1..23: note = RNA
  misc_feature 24..25: note = DNA
agtcatgacatttctcaaaattttt

SEQ ID NO: 166 - DNA, 25 bp, synthetic construct
  source 1..25: mol_type = other DNA
  misc_feature 1..23: note = RNA
  misc_feature 24: note = DNA
  misc_feature 25: note = RNA
gtcatgacatttctcaaagatttta

SEQ ID NO: 167 - RNA, 25 nt, synthetic construct
  source 1..25: mol_type = other RNA
tcatgacatttctcaaagtatttac

SEQ ID NO: 168 - RNA, 25 nt, synthetic construct
  source 1..25: mol_type = other RNA
catgacatttctcaaagttattaca

SEQ ID NO: 169 - RNA, 25 nt, synthetic construct
  source 1..25: mol_type = other RNA
atgacatttctcaaagtttatacag

SEQ ID NO: 170 - DNA, 25 bp, synthetic construct
  source 1..25: mol_type = other DNA
  misc_feature 1..24: note = RNA
  misc_feature 25: note = DNA
tgacatttctcaaagttttaacagt

SEQ ID NO: 171 - DNA, 25 bp, synthetic construct
  source 1..25: mol_type = other DNA
  misc_feature 1..23: note = RNA
  misc_feature 24: note = DNA
  misc_feature 25: note = RNA
gacatttctcaaagtttttacagtg

SEQ ID NO: 172 - DNA, 25 bp, synthetic construct
  source 1..25: mol_type = other DNA
  misc_feature 1..24: note = RNA
  misc_feature 25: note = DNA
acatttctcaaagtttttaaagtgt

SEQ ID NO: 173 - DNA, 25 bp, synthetic construct
  source 1..25: mol_type = other DNA
  misc_feature 1..23: note = RNA
  misc_feature 24: note = DNA
  misc_feature 25: note = RNA
catttctcaaagtttttacagtgta

SEQ ID NO: 174 - DNA, 25 bp, synthetic construct
  source 1..25: mol_type = other DNA
  misc_feature 1..24: note = RNA
  misc_feature 25: note = DNA
atttctcaaagtttttacaatgtat

SEQ ID NO: 175 - DNA, 25 bp, synthetic construct
  source 1..25: mol_type = other DNA
  misc_feature 1..23: note = RNA
  misc_feature 24: note = DNA
  misc_feature 25: note = RNA
tttctcaaagtttttacagagtatc

SEQ ID NO: 176 - RNA, 25 nt, synthetic construct
  source 1..25: mol_type = other RNA
gaagtcttccatcagcagtaattga

SEQ ID NO: 177 - DNA, 25 bp, synthetic construct
  source 1..25: mol_type = other DNA
  misc_feature 1..23: note = RNA
  misc_feature 24: note = DNA
  misc_feature 25: note = RNA
ttccatcagcagtgattgaagtatc

SEQ ID NO: 178 - DNA, 25 bp, synthetic construct
  source 1..25: mol_type = other DNA
  misc_feature 1..24: note = RNA
  misc_feature 25: note = DNA
tccatcagcagtgattgaaatatct

SEQ ID NO: 179 - DNA, 25 bp, synthetic construct
  source 1..25: mol_type = other DNA
  misc_feature 1..23: note = RNA
  misc_feature 24: note = DNA
  misc_feature 25: note = RNA
ccatcagcagtgattgaagaatctg

SEQ ID NO: 180 - DNA, 25 bp, synthetic construct
  source 1..25: mol_type = other DNA
  misc_feature 1..24: note = RNA
  misc_feature 25: note = DNA
catcagcagtgattgaagtatctgt

SEQ ID NO: 181 - DNA, 25 bp, synthetic construct
  source 1..25: mol_type = other DNA
  misc_feature 1..23: note = RNA
  misc_feature 24: note = DNA
  misc_feature 25: note = RNA
atcagcagtgattgaagtaactgta

SEQ ID NO: 182 - RNA, 25 nt, synthetic construct
  source 1..25: mol_type = other RNA
tcagcagtgattgaagtatatgtac

SEQ ID NO: 183 - RNA, 25 nt, synthetic construct
  source 1..25: mol_type = other RNA
cagcagtgattgaagtatcagtacc

SEQ ID NO: 184 - DNA, 25 bp, synthetic construct
  source 1..25: mol_type = other DNA
  misc_feature 1..24: note = RNA
  misc_feature 25: note = DNA
agcagtgattgaagtatctatacct

SEQ ID NO: 185 - DNA, 25 bp, synthetic construct
  source 1..25: mol_type = other DNA
  misc_feature 1..23: note = RNA
  misc_feature 24: note = DNA
  misc_feature 25: note = RNA
gcagtgattgaagtatctgaacctg

SEQ ID NO: 186 - RNA, 25 nt, synthetic construct
  source 1..25: mol_type = other RNA
cagtgattgaagtatctgtacctgc

SEQ ID NO: 187 - RNA, 25 nt, synthetic construct
  source 1..25: mol_type = other RNA
agtgattgaagtatctgtaactgcc

SEQ ID NO: 188 - RNA, 25 nt, synthetic construct
  source 1..25: mol_type = other RNA
attgaagtatctgtacctgacccca

SEQ ID NO: 189 - RNA, 25 nt, synthetic construct
  source 1..25: mol_type = other RNA
catttcggtgcttccctttaactga

SEQ ID NO: 190 - RNA, 25 nt, synthetic construct
  source 1..25: mol_type = other RNA
cggtgcttccctttcactgaagtga

SEQ ID NO: 191 - RNA, 25 nt, synthetic construct
  source 1..25: mol_type = other RNA
ggtgcttccctttcactgaagtgaa

SEQ ID NO: 192 - DNA, 25 bp, synthetic construct
  source 1..25: mol_type = other DNA
  misc_feature 1..24: note = RNA
  misc_feature 25: note = DNA
gtgcttccctttcactgaaatgaat

SEQ ID NO: 193 - DNA, 25 bp, synthetic construct
  source 1..25: mol_type = other DNA
  misc_feature 1..23: note = RNA
  misc_feature 24: note = DNA
  misc_feature 25: note = RNA
tgcttccctttcactgaagagaata

SEQ ID NO: 194 - RNA, 25 nt, synthetic construct
  source 1..25: mol_type = other RNA
gcttccctttcactgaagtaaatac

SEQ ID NO: 195 - RNA, 25 nt, synthetic construct
  source 1..25: mol_type = other RNA
cttccctttcactgaagtgaataca

SEQ ID NO: 196 - DNA, 25 bp, synthetic construct
  source 1..25: mol_type = other DNA
  misc_feature 1..24: note = RNA
  misc_feature 25: note = DNA
ttccctttcactgaagtgaatacat

SEQ ID NO: 197 - DNA, 25 bp, synthetic construct
  source 1..25: mol_type = other DNA
  misc_feature 1..23: note = RNA
  misc_feature 24: note = DNA
  misc_feature 25: note = RNA
tccctttcactgaagtgaaaacatg

SEQ ID NO: 198 - RNA, 25 nt, synthetic construct
  source 1..25: mol_type = other RNA
ccctttcactgaagtgaatacatgg

SEQ ID NO: 199 - DNA, 25 bp, synthetic construct
  source 1..25: mol_type = other DNA
  misc_feature 1..24: note = RNA
  misc_feature 25: note = DNA
cctttcactgaagtgaataaatggt

SEQ ID NO: 200 - DNA, 25 bp, synthetic construct
  source 1..25: mol_type = other DNA
  misc_feature 1..23: note = RNA
  misc_feature 24: note = DNA
  misc_feature 25: note = RNA
ctttcactgaagtgaatacatggta

SEQ ID NO: 201 - RNA, 25 nt, synthetic construct
  source 1..25: mol_type = other RNA
tttcactgaagtgaatacaaggtag

SEQ ID NO: 202 - RNA, 25 nt, synthetic construct
  source 1..25: mol_type = other RNA
ttcactgaagtgaatacatagtagc

SEQ ID NO: 203 - RNA, 25 nt, synthetic construct
  source 1..25: mol_type = other RNA
tcactgaagtgaatacatgatagca

SEQ ID NO: 204 - RNA, 25 nt, synthetic construct
  source 1..25: mol_type = other RNA
cactgaagtgaatacatggaagcag

SEQ ID NO: 205 - RNA, 25 nt, synthetic construct
  source 1..25: mol_type = other RNA
actgaagtgaatacatggtagcagg

SEQ ID NO: 206 - RNA, 25 nt, synthetic construct
  source 1..25: mol_type = other RNA
ctgaagtgaatacatggtaacaggg

SEQ ID NO: 207 - DNA, 25 bp, synthetic construct
  source 1..25: mol_type = other DNA
  misc_feature 1..24: note = RNA
  misc_feature 25: note = DNA
tgaagtgaatacatggtagaagggt

SEQ ID NO: 208 - DNA, 25 bp, synthetic construct
  source 1..25: mol_type = other DNA
  misc_feature 1..24: note = RNA
  misc_feature 25: note = DNA
aagtgaatacatggtagcaaggtct

SEQ ID NO: 209 - DNA, 25 bp, synthetic construct
  source 1..25: mol_type = other DNA
  misc_feature 1..23: note = RNA
  misc_feature 24..25: note = DNA
agtgaatacatggtagcagagtctt

SEQ ID NO: 210 - DNA, 25 bp, synthetic construct
  source 1..25: mol_type = other DNA
  misc_feature 1..23: note = RNA
  misc_feature 24..25: note = DNA
gtgaatacatggtagcaggatcttt

SEQ ID NO: 211 - DNA, 25 bp, synthetic construct
  source 1..25: mol_type = other DNA
  misc_feature 1..24: note = RNA
  misc_feature 25: note = DNA
gaatacatggtagcagggtatttgt

SEQ ID NO: 212 - DNA, 25 bp, synthetic construct
  source 1..25: mol_type = other DNA
  misc_feature 1..23: note = RNA
  misc_feature 24: note = DNA
  misc_feature 25: note = RNA
aatacatggtagcagggtcattgtg

SEQ ID NO: 213 - DNA, 25 bp, synthetic construct
  source 1..25: mol_type = other DNA
  misc_feature 1..23: note = RNA
  misc_feature 24: note = DNA
  misc_feature 25: note = RNA
ggtagcagggtctttgtgtactgtg

SEQ ID NO: 214 - DNA, 25 bp, synthetic construct
  source 1..25: mol_type = other DNA
  misc_feature 1..23: note = RNA
  misc_feature 24..25: note = DNA
agggtctttgtgtgctgtgaatttt

SEQ ID NO: 215 - DNA, 25 bp, synthetic construct
  source 1..25: mol_type = other DNA
  misc_feature 1..24: note = RNA
  misc_feature 25: note = DNA
ggtctttgtgtgctgtggaatttgt

SEQ ID NO: 216 - DNA, 25 bp, synthetic construct
  source 1..25: mol_type = other DNA
  misc_feature 1..23: note = RNA
  misc_feature 24: note = DNA
  misc_feature 25: note = RNA
tgtgtgctgtggattttgtagcttc

SEQ ID NO: 217 - RNA, 25 nt, synthetic construct
  source 1..25: mol_type = other RNA
gtgtgctgtggattttgtgacttca

SEQ ID NO: 218 - RNA, 25 nt, synthetic construct
  source 1..25: mol_type = other RNA
tgtgctgtggattttgtggattcaa

SEQ ID NO: 219 - DNA, 25 bp, synthetic construct
  source 1..25: mol_type = other DNA
  misc_feature 1..24: note = RNA
  misc_feature 25: note = DNA
gtgctgtggattttgtggcatcaat

SEQ ID NO: 220 - DNA, 25 bp, synthetic construct
  source 1..25: mol_type = other DNA
  misc_feature 1..23: note = RNA
  misc_feature 24: note = DNA
  misc_feature 25: note = RNA
tgctgtggattttgtggctacaatc

SEQ ID NO: 221 - DNA, 25 bp, synthetic construct
  source 1..25: mol_type = other DNA
  misc_feature 1..24: note = RNA
  misc_feature 25: note = DNA
gctgtggattttgtggcttaaatct

SEQ ID NO: 222 - DNA, 25 bp, synthetic construct
  source 1..25: mol_type = other DNA
  misc_feature 1..23: note = RNA
  misc_feature 24: note = DNA
  misc_feature 25: note = RNA
ctgtggattttgtggcttcaatcta

SEQ ID NO: 223 - RNA, 25 nt, synthetic construct
  source 1..25: mol_type = other RNA
gtggattttgtggcttcaaactacg

SEQ ID NO: 224 - RNA, 25 nt, synthetic construct
  source 1..25: mol_type = other RNA
tggattttgtggcttcaatatacga

SEQ ID NO: 225 - DNA, 25 bp, synthetic construct
  source 1..25: mol_type = other DNA
  misc_feature 1..23: note = RNA
  misc_feature 24: note = DNA
  misc_feature 25: note = RNA
gattttgtggcttcaatctacgatg

SEQ ID NO: 226 - DNA, 25 bp, synthetic construct
  source 1..25: mol_type = other DNA
  misc_feature 1..24: note = RNA
  misc_feature 25: note = DNA
attttgtggcttcaatctaagatgt

SEQ ID NO: 227 - DNA, 25 bp, synthetic construct
  source 1..25: mol_type = other DNA
  misc_feature 1..24: note = RNA
  misc_feature 25: note = DNA
ccacttatttctaaatcctaactat

SEQ ID NO: 228 - DNA, 25 bp, synthetic construct
  source 1..25: mol_type = other DNA
  misc_feature 1..23: note = RNA
  misc_feature 24..25: note = DNA
cacttatttctaaatcctcactatt

SEQ ID NO: 229 - DNA, 25 bp, synthetic construct
  source 1..25: mol_type = other DNA
  misc_feature 1..23: note = RNA
  misc_feature 24..25: note = DNA
acttatttctaaatcctcaatattt

SEQ ID NO: 230 - DNA, 25 bp, synthetic construct
  source 1..25: mol_type = other DNA
  misc_feature 1..23: note = RNA
  misc_feature 24..25: note = DNA
cttatttctaaatcctcacaatttt

SEQ ID NO: 231 - DNA, 25 bp, synthetic construct
  source 1..25: mol_type = other DNA
  misc_feature 1..23: note = RNA
  misc_feature 24..25: note = DNA
tatttctaaatcctcactaattttt

SEQ ID NO: 232 - DNA, 25 bp, synthetic construct
  source 1..25: mol_type = other DNA
  misc_feature 1..23: note = RNA
  misc_feature 24..25: note = DNA
atttctaaatcctcactatattttt

SEQ ID NO: 233 - DNA, 25 bp, synthetic construct
  source 1..25: mol_type = other DNA
  misc_feature 1..23: note = RNA
  misc_feature 24: note = DNA
  misc_feature 25: note = RNA
tttctaaatcctcactattattttg

SEQ ID NO: 234 - DNA, 25 bp, synthetic construct
  source 1..25: mol_type = other DNA
  misc_feature 1..24: note = RNA
  misc_feature 25: note = DNA
ttctaaatcctcactatttatttgt

SEQ ID NO: 235 - DNA, 25 bp, synthetic construct
  source 1..25: mol_type = other DNA
  misc_feature 1..23: note = RNA
  misc_feature 24..25: note = DNA
tctaaatcctcactattttattgtt

SEQ ID NO: 236 - DNA, 25 bp, synthetic construct
  source 1..25: mol_type = other DNA
  misc_feature 1..23: note = RNA
  misc_feature 24: note = DNA
  misc_feature 25: note = RNA
ctaaatcctcactatttttatgttg

SEQ ID NO: 237 - RNA, 25 nt, synthetic construct
  source 1..25: mol_type = other RNA
taaatcctcactattttttagttgc

SEQ ID NO: 238 - DNA, 25 bp, synthetic construct
  source 1..25: mol_type = other DNA
  misc_feature 1..24: note = RNA
  misc_feature 25: note = DNA
aaatcctcactatttttttattgct

SEQ ID NO: 239 - DNA, 25 bp, synthetic construct
  source 1..25: mol_type = other DNA
  misc_feature 1..23: note = RNA
  misc_feature 24: note = DNA
  misc_feature 25: note = RNA
aatcctcactatttttttgatgctg

SEQ ID NO: 240 - DNA, 25 bp, synthetic construct
  source 1..25: mol_type = other DNA
  misc_feature 1..24: note = RNA
  misc_feature 25: note = DNA
atcctcactatttttttgtagctgt

SEQ ID NO: 241 - DNA, 25 bp, synthetic construct
  source 1..25: mol_type = other DNA
  misc_feature 1..23: note = RNA
  misc_feature 24..25: note = DNA
tcctcactatttttttgttactgtt

SEQ ID NO: 242 - DNA, 25 bp, synthetic construct
  source 1..25: mol_type = other DNA
  misc_feature 1..23: note = RNA
  misc_feature 24: note = DNA
  misc_feature 25: note = RNA
cctcactatttttttgttgatgttg

SEQ ID NO: 243 - DNA, 25 bp, synthetic construct
  source 1..25: mol_type = other DNA
  misc_feature 1..24: note = RNA
  misc_feature 25: note = DNA
ctcactatttttttgttgcagttgt

SEQ ID NO: 244 - DNA, 25 bp, synthetic construct
  source 1..25: mol_type = other DNA
  misc_feature 1..23: note = RNA
  misc_feature 24..25: note = DNA
tcactatttttttgttgctattgtt

SEQ ID NO: 245 - DNA, 25 bp, synthetic construct
  source 1..25: mol_type = other DNA
  misc_feature 1..23: note = RNA
  misc_feature 24: note = DNA
  misc_feature 25: note = RNA
cactatttttttgttgctgatgttc

SEQ ID NO: 246 - RNA, 25 nt, synthetic construct
  source 1..25: mol_type = other RNA
actatttttttgttgctgtagttca

SEQ ID NO: 247 - RNA, 25 nt, synthetic construct
  source 1..25: mol_type = other RNA
ctatttttttgttgctgttattcag

SEQ ID NO: 248 - RNA, 25 nt, synthetic construct
  source 1..25: mol_type = other RNA
tatttttttgttgctgttgatcaga

SEQ ID NO: 249 - RNA, 25 nt, synthetic construct
  source 1..25: mol_type = other RNA
atttttttgttgctgttgtacagaa

SEQ ID NO: 250 - RNA, 25 nt, synthetic construct
  source 1..25: mol_type = other RNA
tttttttgttgctgttgttaagaag

SEQ ID NO: 251 - DNA, 25 bp, synthetic construct
  source 1..25: mol_type = other DNA
  misc_feature 1..24: note = RNA
  misc_feature 25: note = DNA
ttttttgttgctgttgttcagaagt

SEQ ID NO: 252 - DNA, 25 bp, synthetic construct
  source 1..25: mol_type = other DNA
  misc_feature 1..23: note = RNA
  misc_feature 24..25: note = DNA
tttttgttgctgttgttcaaaagtt

SEQ ID NO: 253 - DNA, 25 bp, synthetic construct
  source 1..25: mol_type = other DNA
  misc_feature 1..23: note = RNA
  misc_feature 24: note = DNA
  misc_feature 25: note = RNA
ttttgttgctgttgttcagaagttg

SEQ ID NO: 254 - DNA, 25 bp, synthetic construct
  source 1..25: mol_type = other DNA
  misc_feature 1..24: note = RNA
  misc_feature 25: note = DNA
tttgttgctgttgttcagaagttgt

SEQ ID NO: 255 - DNA, 25 bp, synthetic construct
  source 1..25: mol_type = other DNA
  misc_feature 1..23: note = RNA
  misc_feature 24..25: note = DNA
ttgttgctgttgttcagaaattgtt

SEQ ID NO: 256 - DNA, 25 bp, synthetic construct
  source 1..25: mol_type = other DNA
  misc_feature 1..23: note = RNA
  misc_feature 24: note = DNA
  misc_feature 25: note = RNA
tgttgctgttgttcagaagatgtta

SEQ ID NO: 257 - RNA, 25 nt, synthetic construct
  source 1..25: mol_type = other RNA
gttgctgttgttcagaagtagttag

SEQ ID NO: 258 - DNA, 25 bp, synthetic construct
  source 1..25: mol_type = other DNA
  misc_feature 1..24: note = RNA
  misc_feature 25: note = DNA
ttgctgttgttcagaagttattagt

SEQ ID NO: 259 - DNA, 25 bp, synthetic construct
  source 1..25: mol_type = other DNA
  misc_feature 1..23: note = RNA
  misc_feature 24: note = DNA
  misc_feature 25: note = RNA
tgctgttgttcagaagttgatagtg

SEQ ID NO: 260 - RNA, 25 nt, synthetic construct
  source 1..25: mol_type = other RNA
gctgttgttcagaagttgtaagtga

SEQ ID NO: 261 - DNA, 25 bp, synthetic construct
  source 1..25: mol_type = other DNA
  misc_feature 1..24: note = RNA
  misc_feature 25: note = DNA
ctgttgttcagaagttgttagtgat

SEQ ID NO: 262 - DNA, 25 bp, synthetic construct
  source 1..25: mol_type = other DNA
  misc_feature 1..23: note = RNA
  misc_feature 24..25: note = DNA
tgttgttcagaagttgttaatgatt

SEQ ID NO: 263 - DNA, 25 bp, synthetic construct
  source 1..25: mol_type = other DNA
  misc_feature 1..23: note = RNA
  misc_feature 24..25: note = DNA
gttgttcagaagttgttagagattt

SEQ ID NO: 264 - DNA, 25 bp, synthetic construct
  source 1..25: mol_type = other DNA
  misc_feature 1..23: note = RNA
  misc_feature 24: note = DNA
  misc_feature 25: note = RNA
ttgttcagaagttgttagtaatttg

SEQ ID NO: 265 - RNA, 25 nt, synthetic construct
  source 1..25: mol_type = other RNA
tgttcagaagttgttagtgatttgc

SEQ ID NO: 266 - DNA, 25 bp, synthetic construct
  source 1..25: mol_type = other DNA
  misc_feature 1..24: note = RNA
  misc_feature 25: note = DNA
gttcagaagttgttagtgaattgct

SEQ ID NO: 267 - DNA, 25 bp, synthetic construct
  source 1..25: mol_type = other DNA
  misc_feature 1..23: note = RNA
  misc_feature 24: note = DNA
  misc_feature 25: note = RNA
ttcagaagttgttagtgatatgcta

SEQ ID NO: 268 - DNA, 25 bp, synthetic construct
  source 1..25: mol_type = other DNA
  misc_feature 1..24: note = RNA
  misc_feature 25: note = DNA
tcagaagttgttagtgattagctat

SEQ ID NO: 269 - DNA, 25 bp, synthetic construct
  source 1..25: mol_type = other DNA
  misc_feature 1..23: note = RNA
  misc_feature 24: note = DNA
  misc_feature 25: note = RNA
cagaagttgttagtgatttactatc

SEQ ID NO: 270 - RNA, 25 nt, synthetic construct
  source 1..25: mol_type = other RNA
agaagttgttagtgatttgatatca

SEQ ID NO: 271 - DNA, 25 bp, synthetic construct
  source 1..25: mol_type = other DNA
  misc_feature 1..24: note = RNA
  misc_feature 25: note = DNA
gaagttgttagtgatttgcaatcat

SEQ ID NO: 272 - DNA, 25 bp, synthetic construct
  source 1..25: mol_type = other DNA
  misc_feature 1..23: note = RNA
  misc_feature 24: note = DNA
  misc_feature 25: note = RNA
aagttgttagtgatttgctatcata

SEQ ID NO: 273 - DNA, 25 bp, synthetic construct
  source 1..25: mol_type = other DNA
  misc_feature 1..24: note = RNA
  misc_feature 25: note = DNA
agttgttagtgatttgctaacatat

SEQ ID NO: 274 - DNA, 25 bp, synthetic construct
  source 1..25: mol_type = other DNA
  misc_feature 1..23: note = RNA
  misc_feature 24: note = DNA
  misc_feature 25: note = RNA
gttgttagtgatttgctataatata

SEQ ID NO: 275 - DNA, 25 bp, synthetic construct
  source 1..25: mol_type = other DNA
  misc_feature 1..24: note = RNA
  misc_feature 25: note = DNA
ttgttagtgatttgctatcatatat

SEQ ID NO: 276 - DNA, 25 bp, synthetic construct
  source 1..25: mol_type = other DNA
  misc_feature 1..23: note = RNA
  misc_feature 24..25: note = DNA
attataagatttttaggtgactttt

SEQ ID NO: 277 - DNA, 25 bp, synthetic construct
  source 1..25: mol_type = other DNA
  misc_feature 1..23: note = RNA
  misc_feature 24: note = DNA
  misc_feature 25: note = RNA
ttataagatttttaggtgtatttta

SEQ ID NO: 278 - RNA, 25 nt, synthetic construct
  source 1..25: mol_type = other RNA
tataagatttttaggtgtcatttaa

SEQ ID NO: 279 - DNA, 25 bp, synthetic construct
  source 1..25: mol_type = other DNA
  misc_feature 1..24: note = RNA
  misc_feature 25: note = DNA
ataagatttttaggtgtctattaat

SEQ ID NO: 280 - DNA, 25 bp, synthetic construct
  source 1..25: mol_type = other DNA
  misc_feature 1..23: note = RNA
  misc_feature 24: note = DNA
  misc_feature 25: note = RNA
taagatttttaggtgtcttataatg

SEQ ID NO: 281 - RNA, 25 nt, synthetic construct
  source 1..25: mol_type = other RNA
aagatttttaggtgtctttaaatga

SEQ ID NO: 282 - DNA, 25 bp, synthetic construct
  source 1..25: mol_type = other DNA
  misc_feature 1..24: note = RNA
  misc_feature 25: note = DNA
agatttttaggtgtcttttaatgat

SEQ ID NO: 283 - DNA, 25 bp, synthetic construct
  source 1..25: mol_type = other DNA
  misc_feature 1..23: note = RNA
  misc_feature 24: note = DNA
  misc_feature 25: note = RNA
gatttttaggtgtcttttaatgata

SEQ ID NO: 284 - RNA, 25 nt, synthetic construct
  source 1..25: mol_type = other RNA
atttttaggtgtcttttaaagatac

SEQ ID NO: 285 - DNA, 25 bp, synthetic construct
  source 1..25: mol_type = other DNA
  misc_feature 1..24: note = RNA
  misc_feature 25: note = DNA
tttttaggtgtcttttaataatact

SEQ ID NO: 286 - DNA, 25 bp, synthetic construct
  source 1..25: mol_type = other DNA
  misc_feature 1..23: note = RNA
  misc_feature 24: note = DNA
  misc_feature 25: note = RNA
ttttaggtgtcttttaatgatactg

SEQ ID NO: 287 - DNA, 25 bp, synthetic construct
  source 1..25: mol_type = other DNA
  misc_feature 1..24: note = RNA
  misc_feature 25: note = DNA
tttaggtgtcttttaatgaaactgt

SEQ ID NO: 288 - DNA, 25 bp, synthetic construct
  source 1..25: mol_type = other DNA
  misc_feature 1..23: note = RNA
  misc_feature 24: note = DNA
  misc_feature 25: note = RNA
ttaggtgtcttttaatgatactgtc

SEQ ID NO: 289 - DNA, 25 bp, synthetic construct
  source 1..25: mol_type = other DNA
  misc_feature 1..24: note = RNA
  misc_feature 25: note = DNA
taggtgtcttttaatgataatgtct

SEQ ID NO: 290 - DNA, 25 bp, synthetic construct
  source 1..25: mol_type = other DNA
  misc_feature 1..23: note = RNA
  misc_feature 24: note = DNA
  misc_feature 25: note = RNA
aggtgtcttttaatgatacagtcta

SEQ ID NO: 291 - RNA, 25 nt, synthetic construct
  source 1..25: mol_type = other RNA
ggtgtcttttaatgatactatctaa

SEQ ID NO: 292 - RNA, 25 nt, synthetic construct
  source 1..25: mol_type = other RNA
gtgtcttttaatgatactgactaag

SEQ ID NO: 293 - RNA, 25 nt, synthetic construct
  source 1..25: mol_type = other RNA
tgtcttttaatgatactgtataaga

SEQ ID NO: 294 - RNA, 25 nt, synthetic construct
  source 1..25: mol_type = other RNA
gtcttttaatgatactgtcaaagaa

SEQ ID NO: 295 - DNA, 25 bp, synthetic construct
  source 1..25: mol_type = other DNA
  misc_feature 1..24: note = RNA
  misc_feature 25: note = DNA
tcttttaatgatactgtctaagaat

SEQ ID NO: 296 - DNA, 25 bp, synthetic construct
  source 1..25: mol_type = other DNA
  misc_feature 1..23: note = RNA
  misc_feature 24: note = DNA
  misc_feature 25: note = RNA
cttttaatgatactgtctaagaata

SEQ ID NO: 297 - RNA, 25 nt, synthetic construct
  source 1..25: mol_type = other RNA
ttttaatgatactgtctaaaaataa

SEQ ID NO: 298 - DNA, 25 bp, synthetic construct
  source 1..25: mol_type = other DNA
  misc_feature 1..24: note = RNA
  misc_feature 25: note = DNA
tttaatgatactgtctaagaataat

SEQ ID NO: 299 - DNA, 25 bp, synthetic construct
  source 1..25: mol_type = other DNA
  misc_feature 1..23: note = RNA
  misc_feature 24: note = DNA
  misc_feature 25: note = RNA
ttaatgatactgtctaagaataatg

SEQ ID NO: 300 - RNA, 25 nt, synthetic construct
  source 1..25: mol_type = other RNA
taatgatactgtctaagaaaaatga

SEQ ID NO: 301 - RNA, 25 nt, synthetic construct
  source 1..25: mol_type = other RNA
aatgatactgtctaagaataatgac

SEQ ID NO: 302 - RNA, 25 nt, synthetic construct
  source 1..25: mol_type = other RNA
atgatactgtctaagaataatgacg

SEQ ID NO: 303 - DNA, 25 bp, synthetic construct
  source 1..25: mol_type = other DNA
  misc_feature 1..24: note = RNA
  misc_feature 25: note = DNA
tgatactgtctaagaataaagacgt

SEQ ID NO: 304 - DNA, 25 bp, synthetic construct
  source 1..25: mol_type = other DNA
  misc_feature 1..23: note = RNA
  misc_feature 24: note = DNA
  misc_feature 25: note = RNA
gatactgtctaagaataataacgta

SEQ ID NO: 305 - DNA, 25 bp, synthetic construct
  source 1..25: mol_type = other DNA
  misc_feature 1..24: note = RNA
  misc_feature 25: note = DNA
atactgtctaagaataatgacgtat

SEQ ID NO: 306 - DNA, 25 bp, synthetic construct
  source 1..25: mol_type = other DNA
  misc_feature 1..23: note = RNA
  misc_feature 24..25: note = DNA
tactgtctaagaataatgaagtatt

SEQ ID NO: 307 - DNA, 25 bp, synthetic construct
  source 1..25: mol_type = other DNA
  misc_feature 1..23: note = RNA
  misc_feature 24: note = DNA
  misc_feature 25: note = RNA
gtattgtgaaatttgttaaaatata

SEQ ID NO: 308 - DNA, 25 bp, synthetic construct
  source 1..25: mol_type = other DNA
  misc_feature 1..24: note = RNA
  misc_feature 25: note = DNA
tattgtgaaatttgttaatatatat

SEQ ID NO: 309 - DNA, 25 bp, synthetic construct
  source 1..25: mol_type = other DNA
  misc_feature 1..23: note = RNA
  misc_feature 24: note = DNA
  misc_feature 25: note = RNA
attgtgaaatttgttaataaatata

SEQ ID NO: 310 - DNA, 25 bp, synthetic construct
  source 1..25: mol_type = other DNA
  misc_feature 1..23: note = RNA
  misc_feature 24..25: note = DNA
aaatttgttaatatatataatactt

SEQ ID NO: 311 - DNA, 25 bp, synthetic construct
  source 1..25: mol_type = other DNA
  misc_feature 1..23: note = RNA
  misc_feature 24: note = DNA
  misc_feature 25: note = RNA
aatttgttaatatatataaaactta

SEQ ID NO: 312 - RNA, 25 nt, synthetic construct
  source 1..25: mol_type = other RNA
atttgttaatatatataatacttaa

SEQ ID NO: 313 - RNA, 25 nt, synthetic construct
  source 1..25: mol_type = other RNA
tttgttaatatatataataattaaa

SEQ ID NO: 314 - RNA, 25 nt, synthetic construct
  source 1..25: mol_type = other RNA
ttgttaatatatataatacataaaa

SEQ ID NO: 315 - RNA, 25 nt, synthetic construct
  source 1..25: mol_type = other RNA
tgttaatatatataatactaaaaaa

SEQ ID NO: 316 - DNA, 25 bp, synthetic construct
  source 1..25: mol_type = other DNA
  misc_feature 1..24: note = RNA
  misc_feature 25: note = DNA
gttaatatatataatacttaaaaat

SEQ ID NO: 317 - DNA, 25 bp, synthetic construct
  source 1..25: mol_type = other DNA
  misc_feature 1..23: note = RNA
  misc_feature 24: note = DNA
  misc_feature 25: note = RNA
ttaatatatataatacttaaaaata

SEQ ID NO: 318 - DNA, 25 bp, synthetic construct
  source 1..25: mol_type = other DNA
  misc_feature 1..24: note = RNA
  misc_feature 25: note = DNA
tatgtgagcatgaaactatacacct

SEQ ID NO: 319 - DNA, 25 bp, synthetic construct
  source 1..25: mol_type = other DNA
  misc_feature 1..23: note = RNA
  misc_feature 24: note = DNA
  misc_feature 25: note = RNA
atgtgagcatgaaactatgaaccta

SEQ ID NO: 320 - DNA, 25 bp, synthetic construct
  source 1..25: mol_type = other DNA
  misc_feature 1..23: note = RNA
  misc_feature 24: note = DNA
  misc_feature 25: note = RNA
gtgagcatgaaactatgcaactata

SEQ ID NO: 321 - RNA, 25 nt, synthetic construct
  source 1..25: mol_type = other RNA
tgagcatgaaactatgcacatataa

SEQ ID NO: 322 - RNA, 25 nt, synthetic construct
  source 1..25: mol_type = other RNA
gagcatgaaactatgcaccaataaa

SEQ ID NO: 323 - DNA, 25 bp, synthetic construct
  source 1..25: mol_type = other DNA
  misc_feature 1..24: note = RNA
  misc_feature 25: note = DNA
agcatgaaactatgcacctataaat

SEQ ID NO: 324 - DNA, 25 bp, synthetic construct
  source 1..25: mol_type = other DNA
  misc_feature 1..23: note = RNA
  misc_feature 24: note = DNA
  misc_feature 25: note = RNA
gcatgaaactatgcacctaaaaata

SEQ ID NO: 325 - RNA, 25 nt, synthetic construct
  source 1..25: mol_type = other RNA
catgaaactatgcacctataaatac

SEQ ID NO: 326 - DNA, 25 bp, synthetic construct
  source 1..25: mol_type = other DNA
  misc_feature 1..24: note = RNA
  misc_feature 25: note = DNA
atgaaactatgcacctataaatact

SEQ ID NO: 327 - DNA, 25 bp, synthetic construct
  source 1..25: mol_type = other DNA
  misc_feature 1..23: note = RNA
  misc_feature 24: note = DNA
  misc_feature 25: note = RNA
tgaaactatgcacctataaatacta

SEQ ID NO: 328 - RNA, 25 nt, synthetic construct
  source 1..25: mol_type = other RNA
gaaactatgcacctataaaaactaa

SEQ ID NO: 329 - RNA, 25 nt, synthetic construct
  source 1..25: mol_type = other RNA
aaactatgcacctataaatactaaa

SEQ ID NO: 330 - DNA, 25 bp, synthetic construct
  source 1..25: mol_type = other DNA
  misc_feature 1..24: note = RNA
  misc_feature 25: note = DNA
aactatgcacctataaataataaat

SEQ ID NO: 331 - DNA, 25 bp, synthetic construct
  source 1..25: mol_type = other DNA
  misc_feature 1..23: note = RNA
  misc_feature 24: note = DNA
  misc_feature 25: note = RNA
actatgcacctataaatacaaaata

SEQ ID NO: 332 - DNA, 25 bp, synthetic construct
  source 1..25: mol_type = other DNA
  misc_feature 1..24: note = RNA
  misc_feature 25: note = DNA
ctatgcacctataaatactaaatat

SEQ ID NO: 333 - DNA, 25 bp, synthetic construct
  source 1..25: mol_type = other DNA
  misc_feature 1..23: note = RNA
  misc_feature 24: note = DNA
  misc_feature 25: note = RNA
tatgcacctataaatactaaatatg

SEQ ID NO: 334 - RNA, 25 nt, synthetic construct
  source 1..25: mol_type = other RNA
atgcacctataaatactaaatatga

SEQ ID NO: 335 - DNA, 25 bp, synthetic construct
  source 1..25: mol_type = other DNA
  misc_feature 1..23: note = RNA
  misc_feature 24: note = DNA
  misc_feature 25: note = RNA
gtttgtatataaatggtgaaaatta

SEQ ID NO: 336 - RNA, 25 nt, synthetic construct
  source 1..25: mol_type = other RNA
tttgtatataaatggtgagaattaa

SEQ ID NO: 337 - RNA, 25 nt, synthetic construct
  source 1..25: mol_type = other RNA
ttgtatataaatggtgagaattaaa

SEQ ID NO: 338 - RNA, 25 nt, synthetic construct
  source 1..25: mol_type = other RNA
tgtatataaatggtgagaaataaaa

SEQ ID NO: 339 - DNA, 25 bp, synthetic construct
  source 1..25: mol_type = other DNA
  misc_feature 1..24: note = RNA
  misc_feature 25: note = DNA
gtatataaatggtgagaataaaaat

SEQ ID NO: 340 - DNA, 25 bp, synthetic construct
  source 1..25: mol_type = other DNA
  misc_feature 1..23: note = RNA
  misc_feature 24: note = DNA
  misc_feature 25: note = RNA
tatataaatggtgagaattaaaata

SEQ ID NO: 341 - RNA, 25 nt, synthetic construct
  source 1..25: mol_type = other RNA
atataaatggtgagaattaaaataa

SEQ ID NO: 342 - RNA, 25 nt, synthetic construct
  source 1..25: mol_type = other RNA
tataaatggtgagaattaaaataaa

SEQ ID NO: 343 - RNA, 25 nt, synthetic construct
  source 1..25: mol_type = other RNA
ataaatggtgagaattaaaataaaa

SEQ ID NO: 344 - RNA, 25 nt, synthetic construct
  source 1..25: mol_type = other RNA
taaatggtgagaattaaaaaaaaac

SEQ ID NO: 345 - RNA, 25 nt, synthetic construct
  source 1..25: mol_type = other RNA
aaatggtgagaattaaaataaaacg

SEQ ID NO: 346 - DNA, 25 bp, synthetic construct
  source 1..25: mol_type = other DNA
  misc_feature 1..24: note = RNA
  misc_feature 25: note = DNA
aatggtgagaattaaaataaaacgt

SEQ ID NO: 347 - DNA, 25 bp, synthetic construct
  source 1..25: mol_type = other DNA
  misc_feature 1..23: note = RNA
  misc_feature 24..25: note = DNA
atggtgagaattaaaataaaacgtt

SEQ ID NO: 348 - DNA, 25 bp, synthetic construct
  source 1..25: mol_type = other DNA
  misc_feature 1..23: note = RNA
  misc_feature 24: note = DNA
  misc_feature 25: note = RNA
tggtgagaattaaaataaaacgtta

SEQ ID NO: 349 - DNA, 25 bp, synthetic construct
  source 1..25: mol_type = other DNA
  misc_feature 1..24: note = RNA
  misc_feature 25: note = DNA
ggtgagaattaaaataaaaagttat

SEQ ID NO: 350 - RNA, 25 nt, synthetic construct
  source 1..25: mol_type = other RNA
ttatttttatcccatctcaatttaa

SEQ ID NO: 351 - DNA, 25 bp, synthetic construct
  source 1..25: mol_type = other DNA
  misc_feature 1..23: note = RNA
  misc_feature 24: note = DNA
  misc_feature 25: note = RNA
atttttatcccatctcactataata

SEQ ID NO: 352 - RNA, 25 nt, synthetic construct
  source 1..25: mol_type = other RNA
tttttatcccatctcacttaaataa

SEQ ID NO: 353 - DNA, 25 bp, synthetic construct
  source 1..25: mol_type = other DNA
  misc_feature 1..24: note = RNA
  misc_feature 25: note = DNA
ttttatcccatctcactttaataat

SEQ ID NO: 354 - DNA, 25 bp, synthetic construct
  source 1..25: mol_type = other DNA
  misc_feature 1..23: note = RNA
  misc_feature 24: note = DNA
  misc_feature 25: note = RNA
tttatcccatctcactttaataata

SEQ ID NO: 355 - RNA, 25 nt, synthetic construct
  source 1..25: mol_type = other RNA
ttatcccatctcactttaaaaataa

SEQ ID NO: 356 - RNA, 25 nt, synthetic construct
  source 1..25: mol_type = other RNA
tatcccatctcactttaataataaa

SEQ ID NO: 357 - RNA, 25 nt, synthetic construct
  source 1..25: mol_type = other RNA
atcccatctcactttaataataaaa

SEQ ID NO: 358 - RNA, 25 nt, synthetic construct
  source 1..25: mol_type = other RNA
tcccatctcactttaataaaaaaaa

SEQ ID NO: 359 - DNA, 25 bp, synthetic construct
  source 1..25: mol_type = other DNA
  misc_feature 1..24: note = RNA
  misc_feature 25: note = DNA
cccatctcactttaataataaaaat

SEQ ID NO: 360 - DNA, 25 bp, synthetic construct
  source 1..25: mol_type = other DNA
  misc_feature 1..23: note = RNA
  misc_feature 24: note = DNA
  misc_feature 25: note = RNA
ccatctcactttaataataaaaatc

SEQ ID NO: 361 - RNA, 25 nt, synthetic construct
  source 1..25: mol_type = other RNA
catctcactttaataataaaaatca

SEQ ID NO: 362 - DNA, 25 bp, synthetic construct
  source 1..25: mol_type = other DNA
  misc_feature 1..24: note = RNA
  misc_feature 25: note = DNA
atctcactttaataataaaaatcat

SEQ ID NO: 363 - DNA, 25 bp, synthetic construct
  source 1..25: mol_type = other DNA
  misc_feature 1..23: note = RNA
  misc_feature 24: note = DNA
  misc_feature 25: note = RNA
tctcactttaataataaaaatcatg

SEQ ID NO: 364 - RNA, 25 nt, synthetic construct
  source 1..25: mol_type = other RNA
ctcactttaataataaaaaacatgc

SEQ ID NO: 365 - DNA, 25 bp, synthetic construct
  source 1..25: mol_type = other DNA
  misc_feature 1..24: note = RNA
  misc_feature 25: note = DNA
tcactttaataataaaaataatgct

SEQ ID NO: 366 - DNA, 25 bp, synthetic construct
  source 1..25: mol_type = other DNA
  misc_feature 1..23: note = RNA
  misc_feature 24..25: note = DNA
cactttaataataaaaatcatgctt

SEQ ID NO: 367 - RNA, 25 nt, synthetic construct
  source 1..25: mol_type = other RNA
atttgaagaaggaggaattatagaa

SEQ ID NO: 368 - DNA, 25 bp, synthetic construct
  source 1..25: mol_type = other DNA
  misc_feature 1..24: note = RNA
  misc_feature 25: note = DNA
gaattttagaagaggtagaaaaaat

SEQ ID NO: 369 - DNA, 25 bp, synthetic construct
  source 1..25: mol_type = other DNA
  misc_feature 1..24: note = RNA
  misc_feature 25: note = DNA
agaagaggtagagaaaatgaaacat

SEQ ID NO: 370 - DNA, 25 bp, synthetic construct
  source 1..25: mol_type = other DNA
  misc_feature 1..23: note = RNA
  misc_feature 24..25: note = DNA
gaagaggtagagaaaatggaacatt

SEQ ID NO: 371 - DNA, 25 bp, synthetic construct
  source 1..25: mol_type = other DNA
  misc_feature 1..23: note = RNA
  misc_feature 24: note = DNA
  misc_feature 25: note = RNA
aagaggtagagaaaatggaacatta

SEQ ID NO: 372 - RNA, 25 nt, synthetic construct
  source 1..25: mol_type = other RNA
agaggtagagaaaatggaaaattaa

SEQ ID NO: 373 - RNA, 25 nt, synthetic construct
  source 1..25: mol_type = other RNA
gaggtagagaaaatggaacattaac

SEQ ID NO: 374 - RNA, 25 nt, synthetic construct
  source 1..25: mol_type = other RNA
aggtagagaaaatggaacaataacc

SEQ ID NO: 375 - DNA, 25 bp, synthetic construct
  source 1..25: mol_type = other DNA
  misc_feature 1..24: note = RNA
  misc_feature 25: note = DNA
gtagagaaaatggaacattaaccct

SEQ ID NO: 376 - DNA, 25 bp, synthetic construct
  source 1..25: mol_type = other DNA
  misc_feature 1..23: note = RNA
  misc_feature 24: note = DNA
  misc_feature 25: note = RNA
tagagaaaatggaacattaacccta

SEQ ID NO: 377 - RNA, 25 nt, synthetic construct
  source 1..25: mol_type = other RNA
agagaaaatggaacattaaacctac

SEQ ID NO: 378 - RNA, 25 nt, synthetic construct
  source 1..25: mol_type = other RNA
gagaaaatggaacattaacactaca

SEQ ID NO: 379 - RNA, 25 nt, synthetic construct
  source 1..25: mol_type = other RNA
agaaaatggaacattaaccatacac

SEQ ID NO: 380 - DNA, 25 bp, synthetic construct
  source 1..25: mol_type = other DNA
  misc_feature 1..24: note = RNA
  misc_feature 25: note = DNA
gaaaatggaacattaacccaacact

SEQ ID NO: 381 - DNA, 25 bp, synthetic construct
  source 1..25: mol_type = other DNA
  misc_feature 1..23: note = RNA
  misc_feature 24: note = DNA
  misc_feature 25: note = RNA
aaaatggaacattaaccctacactc

SEQ ID NO: 382 - RNA, 25 nt, synthetic construct
  source 1..25: mol_type = other RNA
atggaacattaaccctacaatcgga

SEQ ID NO: 383 - DNA, 25 bp, synthetic construct
  source 1..25: mol_type = other DNA
  misc_feature 1..23: note = RNA
  misc_feature 24: note = DNA
  misc_feature 25: note = RNA
actgccagaagtgtgttttagtatg

SEQ ID NO: 384 - RNA, 25 nt, synthetic construct
  source 1..25: mol_type = other RNA
ctgccagaagtgtgttttgatatgc

SEQ ID NO: 385 - RNA, 27 nt, synthetic construct
  source 1..27: mol_type = other RNA
tggcctttgaaagtcctttcatgaata

SEQ ID NO: 386 - RNA, 27 nt, synthetic construct
  source 1..27: mol_type = other RNA
ttggcttttgaaagtcctttcatgaat

SEQ ID NO: 387 - RNA, 27 nt, synthetic construct
  source 1..27: mol_type = other RNA
cttggtctttgaaagtcctttcatgaa

SEQ ID NO: 388 - RNA, 27 nt, synthetic construct
  source 1..27: mol_type = other RNA
ccttgtcctttgaaagtcctttcatga

SEQ ID NO: 389 - RNA, 27 nt, synthetic construct
  source 1..27: mol_type = other RNA
tcctttgcctttgaaagtcctttcatg

SEQ ID NO: 390 - RNA, 27 nt, synthetic construct
  source 1..27: mol_type = other RNA
ctccttggcctttgaaagtcctttcat

SEQ ID NO: 391 - RNA, 27 nt, synthetic construct
  source 1..27: mol_type = other RNA
ctcagtagcagccacaactccctcctt

SEQ ID NO: 392 - RNA, 27 nt, synthetic construct
  source 1..27: mol_type = other RNA
tttcttagcagcagccacaactccctc

SEQ ID NO: 393 - RNA, 27 nt, synthetic construct
  source 1..27: mol_type = other RNA
ttttctcagcagcagccacaactccct

SEQ ID NO: 394 - RNA, 27 nt, synthetic construct
  source 1..27: mol_type = other RNA
gttttttcagcagcagccacaactccc

SEQ ID NO: 395 - RNA, 27 nt, synthetic construct
  source 1..27: mol_type = other RNA
tggttttctcagcagcagccacaactc

SEQ ID NO: 396 - RNA, 27 nt, synthetic construct
  source 1..27: mol_type = other RNA
ttggttttctcagcagcagccacaact

SEQ ID NO: 397 - RNA, 27 nt, synthetic construct
  source 1..27: mol_type = other RNA
tttggttttctcagcagcagccacaac

SEQ ID NO: 398 - RNA, 27 nt, synthetic construct
  source 1..27: mol_type = other RNA
gtttgtttttctcagcagcagccacaa

SEQ ID NO: 399 - RNA, 27 nt, synthetic construct
  source 1..27: mol_type = other RNA
tgttttgttttctcagcagcagccaca

SEQ ID NO: 400 - RNA, 27 nt, synthetic construct
  source 1..27: mol_type = other RNA
ctgtttggttttctcagcagcagccac

SEQ ID NO: 401 - RNA, 27 nt, synthetic construct
  source 1..27: mol_type = other RNA
tcttttgtcttctcagccactgttgcc

SEQ ID NO: 402 - RNA, 27 nt, synthetic construct
  source 1..27: mol_type = other RNA
ctctttggtcttctcagccactgttgc

SEQ ID NO: 403 - RNA, 27 nt, synthetic construct
  source 1..27: mol_type = other RNA
gctctttggtcttctcagccactgttg

SEQ ID NO: 404 - RNA, 27 nt, synthetic construct
  source 1..27: mol_type = other RNA
tgctctttggtcttctcagccactgtt

SEQ ID NO: 405 - RNA, 27 nt, synthetic construct
  source 1..27: mol_type = other RNA
ttgctttttggtcttctcagccactgt

SEQ ID NO: 406 - RNA, 27 nt, synthetic construct
  source 1..27: mol_type = other RNA
cttgctctttggtcttctcagccactg

SEQ ID NO: 407 - RNA, 27 nt, synthetic construct
  source 1..27: mol_type = other RNA
acttgttctttggtcttctcagccact

SEQ ID NO: 408 - RNA, 27 nt, synthetic construct
  source 1..27: mol_type = other RNA
cactttctctttggtcttctcagccac

SEQ ID NO: 409 - RNA, 27 nt, synthetic construct
  source 1..27: mol_type = other RNA
tcacttgctctttggtcttctcagcca

SEQ ID NO: 410 - RNA, 27 nt, synthetic construct
  source 1..27: mol_type = other RNA
gtcacttgctctttggtcttctcagcc

SEQ ID NO: 411 - RNA, 27 nt, synthetic construct
  source 1..27: mol_type = other RNA
tgtcatttgctctttggtcttctcagc

SEQ ID NO: 412 - RNA, 27 nt, synthetic construct
  source 1..27: mol_type = other RNA
ttgtctcttgctctttggtcttctcag

SEQ ID NO: 413 - RNA, 27 nt, synthetic construct
  source 1..27: mol_type = other RNA
tttgttacttgctctttggtcttctca

SEQ ID NO: 414 - RNA, 27 nt, synthetic construct
  source 1..27: mol_type = other RNA
atttgtcacttgctctttggtcttctc

SEQ ID NO: 415 - RNA, 27 nt, synthetic construct
  source 1..27: mol_type = other RNA
catttttcacttgctctttggtcttct

SEQ ID NO: 416 - RNA, 27 nt, synthetic construct
  source 1..27: mol_type = other RNA
acatttgtcacttgctctttggtcttc

SEQ ID NO: 417 - RNA, 27 nt, synthetic construct
  source 1..27: mol_type = other RNA
aacatttgtcacttgctctttggtctt

SEQ ID NO: 418 - RNA, 27 nt, synthetic construct
  source 1..27: mol_type = other RNA
caacatttgtcacttgctctttggtct

SEQ ID NO: 419 - RNA, 27 nt, synthetic construct
  source 1..27: mol_type = other RNA
ccaacttttgtcacttgctctttggtc

SEQ ID NO: 420 - RNA, 27 nt, synthetic construct
  source 1..27: mol_type = other RNA
tccaatatttgtcacttgctctttggt

SEQ ID NO: 421 - RNA, 27 nt, synthetic construct
  source 1..27: mol_type = other RNA
ctccatcatttgtcacttgctctttgg

SEQ ID NO: 422 - RNA, 27 nt, synthetic construct
  source 1..27: mol_type = other RNA
cctcctacatttgtcacttgctctttg

SEQ ID NO: 423 - RNA, 27 nt, synthetic construct
  source 1..27: mol_type = other RNA
tcctctaacatttgtcacttgctcttt

SEQ ID NO: 424 - RNA, 27 nt, synthetic construct
  source 1..27: mol_type = other RNA
ctccttcaacatttgtcacttgctctt

SEQ ID NO: 425 - RNA, 27 nt, synthetic construct
  source 1..27: mol_type = other RNA
gctcctccaacatttgtcacttgctct

SEQ ID NO: 426 - RNA, 27 nt, synthetic construct
  source 1..27: mol_type = other RNA
tgctcttccaacatttgtcacttgctc

SEQ ID NO: 427 - RNA, 27 nt, synthetic construct
  source 1..27: mol_type = other RNA
ctgcttctccaacatttgtcacttgct

SEQ ID NO: 428 - RNA, 27 nt, synthetic construct
  source 1..27: mol_type = other RNA
actgctcctccaacatttgtcacttgc

SEQ ID NO: 429 - RNA, 27 nt, synthetic construct
  source 1..27: mol_type = other RNA
cactgttcctccaacatttgtcacttg

SEQ ID NO: 430 - RNA, 27 nt, synthetic construct
  source 1..27: mol_type = other RNA
ccacttctcctccaacatttgtcactt

SEQ ID NO: 431 - RNA, 27 nt, synthetic construct
  source 1..27: mol_type = other RNA
accactgctcctccaacatttgtcact

SEQ ID NO: 432 - RNA, 27 nt, synthetic construct
  source 1..27: mol_type = other RNA
gcacattggaactgagcacttgtacag

SEQ ID NO: 433 - RNA, 27 nt, synthetic construct
  source 1..27: mol_type = other RNA
ggcactttggaactgagcacttgtaca

SEQ ID NO: 434 - RNA, 27 nt, synthetic construct
  source 1..27: mol_type = other RNA
gggcatattggaactgagcacttgtac

SEQ ID NO: 435 - RNA, 27 nt, synthetic construct
  source 1..27: mol_type = other RNA
tgggctcattggaactgagcacttgta

SEQ ID NO: 436 - RNA, 27 nt, synthetic construct
  source 1..27: mol_type = other RNA
ctgggtacattggaactgagcacttgt

SEQ ID NO: 437 - RNA, 27 nt, synthetic construct
  source 1..27: mol_type = other RNA
actggtcacattggaactgagcacttg

SEQ ID NO: 438 - RNA, 27 nt, synthetic construct
  source 1..27: mol_type = other RNA
gactgtgcacattggaactgagcactt

SEQ ID NO: 439 - RNA, 27 nt, synthetic construct
  source 1..27: mol_type = other RNA
tgacttggcacattggaactgagcact

SEQ ID NO: 440 - RNA, 27 nt, synthetic construct
  source 1..27: mol_type = other RNA
atgactgggcacattggaactgagcac

SEQ ID NO: 441 - RNA, 27 nt, synthetic construct
  source 1..27: mol_type = other RNA
catgattgggcacattggaactgagca

SEQ ID NO: 442 - RNA, 27 nt, synthetic construct
  source 1..27: mol_type = other RNA
tcatgtctgggcacattggaactgagc

SEQ ID NO: 443 - RNA, 27 nt, synthetic construct
  source 1..27: mol_type = other RNA
gtcattactgggcacattggaactgag

SEQ ID NO: 444 - RNA, 27 nt, synthetic construct
  source 1..27: mol_type = other RNA
tgtcatgactgggcacattggaactga

SEQ ID NO: 445 - RNA, 27 nt, synthetic construct
  source 1..27: mol_type = other RNA
atgtcttgactgggcacattggaactg

SEQ ID NO: 446 - RNA, 27 nt, synthetic construct
  source 1..27: mol_type = other RNA
aatgttatgactgggcacattggaact

SEQ ID NO: 447 - RNA, 27 nt, synthetic construct
  source 1..27: mol_type = other RNA
aaatgtcatgactgggcacattggaac

SEQ ID NO: 448 - RNA, 27 nt, synthetic construct
  source 1..27: mol_type = other RNA
gaaatttcatgactgggcacattggaa

SEQ ID NO: 449 - RNA, 27 nt, synthetic construct
  source 1..27: mol_type = other RNA
agaaatgtcatgactgggcacattgga

SEQ ID NO: 450 - RNA, 27 nt, synthetic construct
  source 1..27: mol_type = other RNA
ttcaatcactgctgatggaagacttcg

SEQ ID NO: 451 - RNA, 27 nt, synthetic construct
  source 1..27: mol_type = other RNA
cttcattcactgctgatggaagacttc

SEQ ID NO: 452 - RNA, 27 nt, synthetic construct
  source 1..27: mol_type = other RNA
acttctatcactgctgatggaagactt

SEQ ID NO: 453 - RNA, 27 nt, synthetic construct
  source 1..27: mol_type = other RNA
taagttgtagtcacttaggtgttttta

SEQ ID NO: 454 - RNA, 27 nt, synthetic construct
  source 1..27: mol_type = other RNA
ataagtggtagtcacttaggtgttttt

SEQ ID NO: 455 - RNA, 27 nt, synthetic construct
  source 1..27: mol_type = other RNA
aataattggtagtcacttaggtgtttt

SEQ ID NO: 456 - RNA, 27 nt, synthetic construct
  source 1..27: mol_type = other RNA
aaatatgtggtagtcacttaggtgttt

SEQ ID NO: 457 - RNA, 27 nt, synthetic construct
  source 1..27: mol_type = other RNA
gaaattagtggtagtcacttaggtgtt

SEQ ID NO: 458 - RNA, 27 nt, synthetic construct
  source 1..27: mol_type = other RNA
agaaataagtggtagtcacttaggtgt

SEQ ID NO: 459 - RNA, 27 nt, synthetic construct
  source 1..27: mol_type = other RNA
tagaattaagtggtagtcacttaggtg

SEQ ID NO: 460 - RNA, 27 nt, synthetic construct
  source 1..27: mol_type = other RNA
ttagatataagtggtagtcacttaggt

SEQ ID NO: 461 - RNA, 27 nt, synthetic construct
  source 1..27: mol_type = other RNA
tttagtaataagtggtagtcacttagg

SEQ ID NO: 462 - RNA, 27 nt, synthetic construct
  source 1..27: mol_type = other RNA
atttataaataagtggtagtcacttag

SEQ ID NO: 463 - RNA, 27 nt, synthetic construct
  source 1..27: mol_type = other RNA
gattttgaaataagtggtagtcactta

SEQ ID NO: 464 - RNA, 27 nt, synthetic construct
  source 1..27: mol_type = other RNA
ggatttagaaataagtggtagtcactt

SEQ ID NO: 465 - RNA, 27 nt, synthetic construct
  source 1..27: mol_type = other RNA
aggatttagaaataagtggtagtcact

SEQ ID NO: 466 - RNA, 27 nt, synthetic construct
  source 1..27: mol_type = other RNA
gaggatttagaaataagtggtagtcac

SEQ ID NO: 467 - RNA, 27 nt, synthetic construct
  source 1..27: mol_type = other RNA
tgaggttttagaaataagtggtagtca

SEQ ID NO: 468 - RNA, 27 nt, synthetic construct
  source 1..27: mol_type = other RNA
gtgagtatttagaaataagtggtagtc

SEQ ID NO: 469 - RNA, 27 nt, synthetic construct
  source 1..27: mol_type = other RNA
agtgatgatttagaaataagtggtagt

SEQ ID NO: 470 - RNA, 27 nt, synthetic construct
  source 1..27: mol_type = other RNA
ttatatatattaacaaatttcacaata

SEQ ID NO: 471 - RNA, 27 nt, synthetic construct
  source 1..27: mol_type = other RNA
attatttatattaacaaatttcacaat

SEQ ID NO: 472 - RNA, 27 nt, synthetic construct
  source 1..27: mol_type = other RNA
tattatatatattaacaaatttcacaa

SEQ ID NO: 473 - RNA, 27 nt, synthetic construct
  source 1..27: mol_type = other RNA
gtattttatatattaacaaatttcaca

SEQ ID NO: 474 - RNA, 27 nt, synthetic construct
  source 1..27: mol_type = other RNA
agtattatatatattaacaaatttcac

SEQ ID NO: 475 - RNA, 27 nt, synthetic construct
  source 1..27: mol_type = other RNA
tcaccttttatatacaaacacaagtga

SEQ ID NO: 476 - RNA, 27 nt, synthetic construct
  source 1..27: mol_type = other RNA
ctcactatttatatacaaacacaagtg

SEQ ID NO: 477 - RNA, 27 nt, synthetic construct
  source 1..27: mol_type = other RNA
tctcatcatttatatacaaacacaagt

SEQ ID NO: 478 - RNA, 27 nt, synthetic construct
  source 1..27: mol_type = other RNA
ttctctccatttatatacaaacacaag

SEQ ID NO: 479 - RNA, 27 nt, synthetic construct
  source 1..27: mol_type = other RNA
attcttaccatttatatacaaacacaa

SEQ ID NO: 480 - RNA, 27 nt, synthetic construct
  source 1..27: mol_type = other RNA
aattctcaccatttatatacaaacaca

SEQ ID NO: 481 - RNA, 27 nt, synthetic construct
  source 1..27: mol_type = other RNA
ggctattgaattcctttacaccacact

SEQ ID NO: 482 - RNA, 27 nt, synthetic construct
  source 1..27: mol_type = other RNA
tggcttatgaattcctttacaccacac

SEQ ID NO: 483 - RNA, 27 nt, synthetic construct
  source 1..27: mol_type = other RNA
atggctaatgaattcctttacaccaca

SEQ ID NO: 484 - RNA, 27 nt, synthetic construct
  source 1..27: mol_type = other RNA
catggttaatgaattcctttacaccac

SEQ ID NO: 485 - RNA, 27 nt, synthetic construct
  source 1..27: mol_type = other RNA
ccatgtctaatgaattcctttacacca

SEQ ID NO: 486 - RNA, 27 nt, synthetic construct
  source 1..27: mol_type = other RNA
tccattgctaatgaattcctttacacc

SEQ ID NO: 487 - RNA, 27 nt, synthetic construct
  source 1..27: mol_type = other RNA
atccatggctaatgaattcctttacac

SEQ ID NO: 488 - RNA, 27 nt, synthetic construct
  source 1..27: mol_type = other RNA
catccttggctaatgaattcctttaca

SEQ ID NO: 489 - RNA, 27 nt, synthetic construct
  source 1..27: mol_type = other RNA
acatctatggctaatgaattcctttac

SEQ ID NO: 490 - RNA, 27 nt, synthetic construct
  source 1..27: mol_type = other RNA
tacattcatggctaatgaattccttta

SEQ ID NO: 491 - RNA, 27 nt, synthetic construct
  source 1..27: mol_type = other RNA
atacatccatggctaatgaattccttt

SEQ ID NO: 492 - RNA, 27 nt, synthetic construct
  source 1..27: mol_type = other RNA
aatacttccatggctaatgaattcctt

SEQ ID NO: 493 - RNA, 27 nt, synthetic construct
  source 1..27: mol_type = other RNA
gaatatatccatggctaatgaattcct

SEQ ID NO: 494 - RNA, 27 nt, synthetic construct
  source 1..27: mol_type = other RNA
tgaattcatccatggctaatgaattcc

SEQ ID NO: 495 - RNA, 27 nt, synthetic construct
  source 1..27: mol_type = other RNA
atgaatacatccatggctaatgaattc

SEQ ID NO: 496 - RNA, 27 nt, synthetic construct
  source 1..27: mol_type = other RNA
catgattacatccatggctaatgaatt

SEQ ID NO: 497 - RNA, 27 nt, synthetic construct
  source 1..27: mol_type = other RNA
tcatgtatacatccatggctaatgaat

SEQ ID NO: 498 - RNA, 27 nt, synthetic construct
  source 1..27: mol_type = other RNA
ttcattaatacatccatggctaatgaa

SEQ ID NO: 499 - RNA, 27 nt, synthetic construct
  source 1..27: mol_type = other RNA
tttcatgaatacatccatggctaatga

SEQ ID NO: 500 - RNA, 27 nt, synthetic construct
  source 1..27: mol_type = other RNA
ctttcttgaatacatccatggctaatg

SEQ ID NO: 501 - RNA, 27 nt, synthetic construct
  source 1..27: mol_type = other RNA
ccttttatgaatacatccatggctaat

SEQ ID NO: 502 - RNA, 27 nt, synthetic construct
  source 1..27: mol_type = other RNA
tcctttcatgaatacatccatggctaa

SEQ ID NO: 503 - RNA, 27 nt, synthetic construct
  source 1..27: mol_type = other RNA
gtcctttcatgaatacatccatggcta

SEQ ID NO: 504 - RNA, 27 nt, synthetic construct
  source 1..27: mol_type = other RNA
agtcctttcatgaatacatccatggct

SEQ ID NO: 505 - RNA, 27 nt, synthetic construct
  source 1..27: mol_type = other RNA
aagtcttttcatgaatacatccatggc

SEQ ID NO: 506 - RNA, 27 nt, synthetic construct
  source 1..27: mol_type = other RNA
aaagttctttcatgaatacatccatgg

SEQ ID NO: 507 - RNA, 27 nt, synthetic construct
  source 1..27: mol_type = other RNA
gaaagtcctttcatgaatacatccatg

SEQ ID NO: 508 - RNA, 27 nt, synthetic construct
  source 1..27: mol_type = other RNA
tgaaattcctttcatgaatacatccat

SEQ ID NO: 509 - RNA, 27 nt, synthetic construct
  source 1..27: mol_type = other RNA
ttgaatgtcctttcatgaatacatcca

SEQ ID NO: 510 - RNA, 27 nt, synthetic construct
  source 1..27: mol_type = other RNA
tttgatagtcctttcatgaatacatcc

SEQ ID NO: 511 - RNA, 27 nt, synthetic construct
  source 1..27: mol_type = other RNA
ccttttaaagtcctttcatgaatacat

SEQ ID NO: 512 - RNA, 27 nt, synthetic construct
  source 1..27: mol_type = other RNA
ctcttttgtctttcctgctgcttctgc

SEQ ID NO: 513 - RNA, 27 nt, synthetic construct
  source 1..27: mol_type = other RNA
acaccttcttttgtctttcctgctgct

SEQ ID NO: 514 - RNA, 27 nt, synthetic construct
  source 1..27: mol_type = other RNA
gaacatcctcttttgtctttcctgctg

SEQ ID NO: 515 - RNA, 27 nt, synthetic construct
  source 1..27: mol_type = other RNA
tagagtacaccctcttttgtctttcct

SEQ ID NO: 516 - RNA, 27 nt, synthetic construct
  source 1..27: mol_type = other RNA
atagataacaccctcttttgtctttcc

SEQ ID NO: 517 - RNA, 27 nt, synthetic construct
  source 1..27: mol_type = other RNA
acatatagaacaccctcttttgtcttt

SEQ ID NO: 518 - RNA, 27 nt, synthetic construct
  source 1..27: mol_type = other RNA
tacattgagaacaccctcttttgtctt

SEQ ID NO: 519 - RNA, 27 nt, synthetic construct
  source 1..27: mol_type = other RNA
ggagcttacatagagaacaccctcttt

SEQ ID NO: 520 - RNA, 27 nt, synthetic construct
  source 1..27: mol_type = other RNA
ttggatcctacatagagaacaccctct

SEQ ID NO: 521 - RNA, 27 nt, synthetic construct
  source 1..27: mol_type = other RNA
ttttgtagcctacatagagaacaccct

SEQ ID NO: 522 - RNA, 27 nt, synthetic construct
  source 1..27: mol_type = other RNA
ggttcttagtcttgatacccttcctca

SEQ ID NO: 523 - RNA, 27 nt, synthetic construct
  source 1..27: mol_type = other RNA
tcaggttcgtagtcttgatacccttcc

SEQ ID NO: 524 - RNA, 27 nt, synthetic construct
  source 1..27: mol_type = other RNA
ttcagtttcgtagtcttgatacccttc

SEQ ID NO: 525 - RNA, 27 nt, synthetic construct
  source 1..27: mol_type = other RNA
taggcttcaggttcgtagtcttgatac

SEQ ID NO: 526 - RNA, 27 nt, synthetic construct
  source 1..27: mol_type = other RNA
ttaggtttcaggttcgtagtcttgata

SEQ ID NO: 527 - RNA, 27 nt, synthetic construct
  source 1..27: mol_type = other RNA
tcttatgcttcaggttcgtagtcttga

SEQ ID NO: 528 - RNA, 27 nt, synthetic construct
  source 1..27: mol_type = other RNA
tttcttaggcttcaggttcgtagtctt

SEQ ID NO: 529 - RNA, 27 nt, synthetic construct
  source 1..27: mol_type = other RNA
atttcttaggcttcaggttcgtagtct

SEQ ID NO: 530 - RNA, 27 nt, synthetic construct
  source 1..27: mol_type = other RNA
tattttttaggcttcaggttcgtagtc

SEQ ID NO: 531 - RNA, 27 nt, synthetic construct
  source 1..27: mol_type = other RNA
gatatttcttaggcttcaggttcgtag

SEQ ID NO: 532 - RNA, 27 nt, synthetic construct
  source 1..27: mol_type = other RNA
agatatttcttaggcttcaggttcgta

SEQ ID NO: 533 - RNA, 27 nt, synthetic construct
  source 1..27: mol_type = other RNA
aaagatatttcttaggcttcaggttcg

SEQ ID NO: 534 - RNA, 27 nt, synthetic construct
  source 1..27: mol_type = other RNA
caaagttatttcttaggcttcaggttc

SEQ ID NO: 535 - RNA, 27 nt, synthetic construct
  source 1..27: mol_type = other RNA
gcaaatatatttcttaggcttcaggtt

SEQ ID NO: 536 - RNA, 27 nt, synthetic construct
  source 1..27: mol_type = other RNA
agcaatgatatttcttaggcttcaggt

SEQ ID NO: 537 - RNA, 27 nt, synthetic construct
  source 1..27: mol_type = other RNA
gagcatagatatttcttaggcttcagg

SEQ ID NO: 538 - RNA, 27 nt, synthetic construct
  source 1..27: mol_type = other RNA
actggtagcaaagatatttcttaggct

SEQ ID NO: 539 - RNA, 27 nt, synthetic construct
  source 1..27: mol_type = other RNA
aactgtgagcaaagatatttcttaggc

SEQ ID NO: 540 - RNA, 27 nt, synthetic construct
  source 1..27: mol_type = other RNA
agaaattgggagcaaagatatttctta

SEQ ID NO: 541 - RNA, 27 nt, synthetic construct
  source 1..27: mol_type = other RNA
tcaagtaactgggagcaaagatatttc

SEQ ID NO: 542 - RNA, 27 nt, synthetic construct
  source 1..27: mol_type = other RNA
ctcaataaactgggagcaaagatattt

SEQ ID NO: 543 - RNA, 27 nt, synthetic construct
  source 1..27: mol_type = other RNA
tctgttagcagatctcaagaaactggg

SEQ ID NO: 544 - RNA, 27 nt, synthetic construct
  source 1..27: mol_type = other RNA
cacattggaactgagcacttgtacagg

SEQ ID NO: 545 - RNA, 27 nt, synthetic construct
  source 1..27: mol_type = other RNA
tgagatatgtcatgactgggcacattg

SEQ ID NO: 546 - RNA, 27 nt, synthetic construct
  source 1..27: mol_type = other RNA
ttgagtaatgtcatgactgggcacatt

SEQ ID NO: 547 - RNA, 27 nt, synthetic construct
  source 1..27: mol_type = other RNA
tttgataaatgtcatgactgggcacat

SEQ ID NO: 548 - RNA, 27 nt, synthetic construct
  source 1..27: mol_type = other RNA
aaaactttgagaaatgtcatgactggg

SEQ ID NO: 549 - RNA, 27 nt, synthetic construct
  source 1..27: mol_type = other RNA
aaaaattttgagaaatgtcatgactgg

SEQ ID NO: 550 - RNA, 27 nt, synthetic construct
  source 1..27: mol_type = other RNA
taaaatctttgagaaatgtcatgactg

SEQ ID NO: 551 - RNA, 27 nt, synthetic construct
  source 1..27: mol_type = other RNA
gtaaatactttgagaaatgtcatgact

SEQ ID NO: 552 - RNA, 27 nt, synthetic construct
  source 1..27: mol_type = other RNA
tgtaataactttgagaaatgtcatgac

SEQ ID NO: 553 - RNA, 27 nt, synthetic construct
  source 1..27: mol_type = other RNA
ctgtataaactttgagaaatgtcatga

SEQ ID NO: 554 - RNA, 27 nt, synthetic construct
  source 1..27: mol_type = other RNA
actgttaaaactttgagaaatgtcatg

SEQ ID NO: 555 - RNA, 27 nt, synthetic construct
  source 1..27: mol_type = other RNA
cactgtaaaaactttgagaaatgtcat

SEQ ID NO: 556 - RNA, 27 nt, synthetic construct
  source 1..27: mol_type = other RNA
acactttaaaaactttgagaaatgtca

SEQ ID NO: 557 - RNA, 27 nt, synthetic construct
  source 1..27: mol_type = other RNA
tacactgtaaaaactttgagaaatgtc

SEQ ID NO: 558 - RNA, 27 nt, synthetic construct
  source 1..27: mol_type = other RNA
atacattgtaaaaactttgagaaatgt

SEQ ID NO: 559 - RNA, 27 nt, synthetic construct
  source 1..27: mol_type = other RNA
gatactctgtaaaaactttgagaaatg

SEQ ID NO: 560 - RNA, 27 nt, synthetic construct
  source 1..27: mol_type = other RNA
tcaattactgctgatggaagacttcga

SEQ ID NO: 561 - RNA, 27 nt, synthetic construct
  source 1..27: mol_type = other RNA
gatacttcaatcactgctgatggaaga

SEQ ID NO: 562 - RNA, 27 nt, synthetic construct
  source 1..27: mol_type = other RNA
agatatttcaatcactgctgatggaag

SEQ ID NO: 563 - RNA, 27 nt, synthetic construct
  source 1..27: mol_type = other RNA
cagattcttcaatcactgctgatggaa

SEQ ID NO: 564 - RNA, 27 nt, synthetic construct
  source 1..27: mol_type = other RNA
acagatacttcaatcactgctgatgga

SEQ ID NO: 565 - RNA, 27 nt, synthetic construct
  source 1..27: mol_type = other RNA
tacagttacttcaatcactgctgatgg

SEQ ID NO: 566 - RNA, 27 nt, synthetic construct
  source 1..27: mol_type = other RNA
gtacatatacttcaatcactgctgatg

SEQ ID NO: 567 - RNA, 27 nt, synthetic construct
  source 1..27: mol_type = other RNA
ggtactgatacttcaatcactgctgat

SEQ ID NO: 568 - RNA, 27 nt, synthetic construct
  source 1..27: mol_type = other RNA
aggtatagatacttcaatcactgctga

SEQ ID NO: 569 - RNA, 27 nt, synthetic construct
  source 1..27: mol_type = other RNA
caggttcagatacttcaatcactgctg

SEQ ID NO: 570 - RNA, 27 nt, synthetic construct
  source 1..27: mol_type = other RNA
gcaggtacagatacttcaatcactgct

SEQ ID NO: 571 - RNA, 27 nt, synthetic construct
  source 1..27: mol_type = other RNA
ggcagttacagatacttcaatcactgc

SEQ ID NO: 572 - RNA, 27 nt, synthetic construct
  source 1..27: mol_type = other RNA
tggggtcaggtacagatacttcaatca

SEQ ID NO: 573 - RNA, 27 nt, synthetic construct
  source 1..27: mol_type = other RNA
tcagttaaagggaagcaccgaaatgct

SEQ ID NO: 574 - RNA, 27 nt, synthetic construct
  source 1..27: mol_type = other RNA
tcacttcagtgaaagggaagcaccgaa

SEQ ID NO: 575 - RNA, 27 nt, synthetic construct
  source 1..27: mol_type = other RNA
ttcacttcagtgaaagggaagcaccga

SEQ ID NO: 576 - RNA, 27 nt, synthetic construct
  source 1..27: mol_type = other RNA
attcatttcagtgaaagggaagcaccg

SEQ ID NO: 577 - RNA, 27 nt, synthetic construct
  source 1..27: mol_type = other RNA
tattctcttcagtgaaagggaagcacc

SEQ ID NO: 578 - RNA, 27 nt, synthetic construct
  source 1..27: mol_type = other RNA
gtatttacttcagtgaaagggaagcac

SEQ ID NO: 579 - RNA, 27 nt, synthetic construct
  source 1..27: mol_type = other RNA
tgtattcacttcagtgaaagggaagca

SEQ ID NO: 580 - RNA, 27 nt, synthetic construct
  source 1..27: mol_type = other RNA
atgtattcacttcagtgaaagggaagc

SEQ ID NO: 581 - RNA, 27 nt, synthetic construct
  source 1..27: mol_type = other RNA
catgttttcacttcagtgaaagggaag

SEQ ID NO: 582 - RNA, 27 nt, synthetic construct
  source 1..27: mol_type = other RNA
ccatgtattcacttcagtgaaagggaa

SEQ ID NO: 583 - RNA, 27 nt, synthetic construct
  source 1..27: mol_type = other RNA
accatttattcacttcagtgaaaggga

SEQ ID NO: 584 - RNA, 27 nt, synthetic construct
  source 1..27: mol_type = other RNA
taccatgtattcacttcagtgaaaggg

SEQ ID NO: 585 - RNA, 27 nt, synthetic construct
  source 1..27: mol_type = other RNA
ctaccttgtattcacttcagtgaaagg

SEQ ID NO: 586 - RNA, 27 nt, synthetic construct
  source 1..27: mol_type = other RNA
gctactatgtattcacttcagtgaaag

SEQ ID NO: 587 - RNA, 27 nt, synthetic construct
  source 1..27: mol_type = other RNA
tgctatcatgtattcacttcagtgaaa

SEQ ID NO: 588 - RNA, 27 nt, synthetic construct
  source 1..27: mol_type = other RNA
ctgcttccatgtattcacttcagtgaa

SEQ ID NO: 589 - RNA, 27 nt, synthetic construct
  source 1..27: mol_type = other RNA
cctgctaccatgtattcacttcagtga

SEQ ID NO: 590 - RNA, 27 nt, synthetic construct
  source 1..27: mol_type = other RNA
ccctgttaccatgtattcacttcagtg

SEQ ID NO: 591 - RNA, 27 nt, synthetic construct
  source 1..27: mol_type = other RNA
acccttctaccatgtattcacttcagt

SEQ ID NO: 592 - RNA, 27 nt, synthetic construct
  source 1..27: mol_type = other RNA
agaccttgctaccatgtattcacttca

SEQ ID NO: 593 - RNA, 27 nt, synthetic construct
  source 1..27: mol_type = other RNA
aagactctgctaccatgtattcacttc

SEQ ID NO: 594 - RNA, 27 nt, synthetic construct
  source 1..27: mol_type = other RNA
aaagatcctgctaccatgtattcactt

SEQ ID NO: 595 - RNA, 27 nt, synthetic construct
  source 1..27: mol_type = other RNA
acaaataccctgctaccatgtattcac

SEQ ID NO: 596 - RNA, 27 nt, synthetic construct
  source 1..27: mol_type = other RNA
cacaatgaccctgctaccatgtattca

SEQ ID NO: 597 - RNA, 27 nt, synthetic construct
  source 1..27: mol_type = other RNA
cacagtacacaaagaccctgctaccat

SEQ ID NO: 598 - RNA, 27 nt, synthetic construct
  source 1..27: mol_type = other RNA
aaaattcacagcacacaaagaccctgc

SEQ ID NO: 599 - RNA, 27 nt, synthetic construct
  source 1..27: mol_type = other RNA
acaaattccacagcacacaaagaccct

SEQ ID NO: 600 - RNA, 27 nt, synthetic construct
  source 1..27: mol_type = other RNA
gaagctacaaaatccacagcacacaaa

SEQ ID NO: 601 - RNA, 27 nt, synthetic construct
  source 1..27: mol_type = other RNA
tgaagtcacaaaatccacagcacacaa

SEQ ID NO: 602 - RNA, 27 nt, synthetic construct
  source 1..27: mol_type = other RNA
ttgaatccacaaaatccacagcacaca

SEQ ID NO: 603 - RNA, 27 nt, synthetic construct
  source 1..27: mol_type = other RNA
attgatgccacaaaatccacagcacac

SEQ ID NO: 604 - RNA, 27 nt, synthetic construct
  source 1..27: mol_type = other RNA
gattgtagccacaaaatccacagcaca

SEQ ID NO: 605 - RNA, 27 nt, synthetic construct
  source 1..27: mol_type = other RNA
agatttaagccacaaaatccacagcac

SEQ ID NO: 606 - RNA, 27 nt, synthetic construct
  source 1..27: mol_type = other RNA
tagattgaagccacaaaatccacagca

SEQ ID NO: 607 - RNA, 27 nt, synthetic construct
  source 1..27: mol_type = other RNA
cgtagtttgaagccacaaaatccacag

SEQ ID NO: 608 - RNA, 27 nt, synthetic construct
  source 1..27: mol_type = other RNA
tcgtatattgaagccacaaaatccaca

SEQ ID NO: 609 - RNA, 27 nt, synthetic construct
  source 1..27: mol_type = other RNA
catcgtagattgaagccacaaaatcca

SEQ ID NO: 610 - RNA, 27 nt, synthetic construct
  source 1..27: mol_type = other RNA
acatcttagattgaagccacaaaatcc

SEQ ID NO: 611 - RNA, 27 nt, synthetic construct
  source 1..27: mol_type = other RNA
atagttaggatttagaaataagtggta

SEQ ID NO: 612 - RNA, 27 nt, synthetic construct
  source 1..27: mol_type = other RNA
aatagtgaggatttagaaataagtggt

SEQ ID NO: 613 - RNA, 27 nt, synthetic construct
  source 1..27: mol_type = other RNA
aaatattgaggatttagaaataagtgg

SEQ ID NO: 614 - RNA, 27 nt, synthetic construct
  source 1..27: mol_type = other RNA
aaaattgtgaggatttagaaataagtg

SEQ ID NO: 615 - RNA, 27 nt, synthetic construct
  source 1..27: mol_type = other RNA
aaaaattagtgaggatttagaaataag

SEQ ID NO: 616 - RNA, 27 nt, synthetic construct
  source 1..27: mol_type = other RNA
aaaaatatagtgaggatttagaaataa

SEQ ID NO: 617 - RNA, 27 nt, synthetic construct
  source 1..27: mol_type = other RNA
caaaataatagtgaggatttagaaata

SEQ ID NO: 618 - RNA, 27 nt, synthetic construct
  source 1..27: mol_type = other RNA
acaaataaatagtgaggatttagaaat

SEQ ID NO: 619 - RNA, 27 nt, synthetic construct
  source 1..27: mol_type = other RNA
aacaataaaatagtgaggatttagaaa

SEQ ID NO: 620 - RNA, 27 nt, synthetic construct
  source 1..27: mol_type = other RNA
caacataaaaatagtgaggatttagaa

SEQ ID NO: 621 - RNA, 27 nt, synthetic construct
  source 1..27: mol_type = other RNA
gcaactaaaaaatagtgaggatttaga

SEQ ID NO: 622 - RNA, 27 nt, synthetic construct
  source 1..27: mol_type = other RNA
agcaataaaaaaatagtgaggatttag

SEQ ID NO: 623 - RNA, 27 nt, synthetic construct
  source 1..27: mol_type = other RNA
cagcatcaaaaaaatagtgaggattta

SEQ ID NO: 624 - RNA, 27 nt, synthetic construct
  source 1..27: mol_type = other RNA
acagctacaaaaaaatagtgaggattt

SEQ ID NO: 625 - RNA, 27 nt, synthetic construct
  source 1..27: mol_type = other RNA
aacagtaacaaaaaaatagtgaggatt

SEQ ID NO: 626 - RNA, 27 nt, synthetic construct
  source 1..27: mol_type = other RNA
caacatcaacaaaaaaatagtgaggat

SEQ ID NO: 627 - RNA, 27 nt, synthetic construct
  source 1..27: mol_type = other RNA
acaactgcaacaaaaaaatagtgagga

SEQ ID NO: 628 - RNA, 27 nt, synthetic construct
  source 1..27: mol_type = other RNA
aacaatagcaacaaaaaaatagtgagg

SEQ ID NO: 629 - RNA, 27 nt, synthetic construct
  source 1..27: mol_type = other RNA
gaacatcagcaacaaaaaaatagtgag

SEQ ID NO: 630 - RNA, 27 nt, synthetic construct
  source 1..27: mol_type = other RNA
tgaactacagcaacaaaaaaatagtga

SEQ ID NO: 631 - RNA, 27 nt, synthetic construct
  source 1..27: mol_type = other RNA
ctgaataacagcaacaaaaaaatagtg

SEQ ID NO: 632 - RNA, 27 nt, synthetic construct
  source 1..27: mol_type = other RNA
tctgatcaacagcaacaaaaaaatagt

SEQ ID NO: 633 - RNA, 27 nt, synthetic construct
  source 1..27: mol_type = other RNA
ttctgtacaacagcaacaaaaaaatag

SEQ ID NO: 634 - RNA, 27 nt, synthetic construct
  source 1..27: mol_type = other RNA
cttcttaacaacagcaacaaaaaaata

SEQ ID NO: 635 - RNA, 27 nt, synthetic construct
  source 1..27: mol_type = other RNA
acttctgaacaacagcaacaaaaaaat

SEQ ID NO: 636 - RNA, 27 nt, synthetic construct
  source 1..27: mol_type = other RNA
aacttttgaacaacagcaacaaaaaaa

SEQ ID NO: 637 - RNA, 27 nt, synthetic construct
  source 1..27: mol_type = other RNA
caacttctgaacaacagcaacaaaaaa

SEQ ID NO: 638 - RNA, 27 nt, synthetic construct
  source 1..27: mol_type = other RNA
acaacttctgaacaacagcaacaaaaa

SEQ ID NO: 639 - RNA, 27 nt, synthetic construct
  source 1..27: mol_type = other RNA
aacaatttctgaacaacagcaacaaaa

SEQ ID NO: 640 - RNA, 27 nt, synthetic construct
  source 1..27: mol_type = other RNA
taacatcttctgaacaacagcaacaaa

SEQ ID NO: 641 - RNA, 27 nt, synthetic construct
  source 1..27: mol_type = other RNA
ctaactacttctgaacaacagcaacaa

SEQ ID NO: 642 - RNA, 27 nt, synthetic construct
  source 1..27: mol_type = other RNA
actaataacttctgaacaacagcaaca

SEQ ID NO: 643 - RNA, 27 nt, synthetic construct
  source 1..27: mol_type = other RNA
cactatcaacttctgaacaacagcaac

SEQ ID NO: 644 - RNA, 27 nt, synthetic construct
  source 1..27: mol_type = other RNA
tcacttacaacttctgaacaacagcaa

SEQ ID NO: 645 - RNA, 27 nt, synthetic construct
  source 1..27: mol_type = other RNA
atcactaacaacttctgaacaacagca

SEQ ID NO: 646 - RNA, 27 nt, synthetic construct
  source 1..27: mol_type = other RNA
aatcattaacaacttctgaacaacagc

SEQ ID NO: 647 - RNA, 27 nt, synthetic construct
  source 1..27: mol_type = other RNA
aaatctctaacaacttctgaacaacag

SEQ ID NO: 648 - RNA, 27 nt, synthetic construct
  source 1..27: mol_type = other RNA
caaattactaacaacttctgaacaaca

SEQ ID NO: 649 - RNA, 27 nt, synthetic construct
  source 1..27: mol_type = other RNA
gcaaatcactaacaacttctgaacaac

SEQ ID NO: 650 - RNA, 27 nt, synthetic construct
  source 1..27: mol_type = other RNA
agcaattcactaacaacttctgaacaa

SEQ ID NO: 651 - RNA, 27 nt, synthetic construct
  source 1..27: mol_type = other RNA
tagcatatcactaacaacttctgaaca

SEQ ID NO: 652 - RNA, 27 nt, synthetic construct
  source 1..27: mol_type = other RNA
atagctaatcactaacaacttctgaac

SEQ ID NO: 653 - RNA, 27 nt, synthetic construct
  source 1..27: mol_type = other RNA
gatagtaaatcactaacaacttctgaa

SEQ ID NO: 654 - RNA, 27 nt, synthetic construct
  source 1..27: mol_type = other RNA
tgatatcaaatcactaacaacttctga

SEQ ID NO: 655 - RNA, 27 nt, synthetic construct
  source 1..27: mol_type = other RNA
atgattgcaaatcactaacaacttctg

SEQ ID NO: 656 - RNA, 27 nt, synthetic construct
  source 1..27: mol_type = other RNA
tatgatagcaaatcactaacaacttct

SEQ ID NO: 657 - RNA, 27 nt, synthetic construct
  source 1..27: mol_type = other RNA
atatgttagcaaatcactaacaacttc

SEQ ID NO: 658 - RNA, 27 nt, synthetic construct
  source 1..27: mol_type = other RNA
tatattatagcaaatcactaacaactt

SEQ ID NO: 659 - RNA, 27 nt, synthetic construct
  source 1..27: mol_type = other RNA
atatatgatagcaaatcactaacaact

SEQ ID NO: 660 - RNA, 27 nt, synthetic construct
  source 1..27: mol_type = other RNA
aaaagtcacctaaaaatcttataatat

SEQ ID NO: 661 - RNA, 27 nt, synthetic construct
  source 1..27: mol_type = other RNA
taaaatacacctaaaaatcttataata

SEQ ID NO: 662 - RNA, 27 nt, synthetic construct
  source 1..27: mol_type = other RNA
ttaaatgacacctaaaaatcttataat

SEQ ID NO: 663 - RNA, 27 nt, synthetic construct
  source 1..27: mol_type = other RNA
attaatagacacctaaaaatcttataa

SEQ ID NO: 664 - RNA, 27 nt, synthetic construct
  source 1..27: mol_type = other RNA
cattataagacacctaaaaatcttata

SEQ ID NO: 665 - RNA, 27 nt, synthetic construct
  source 1..27: mol_type = other RNA
tcatttaaagacacctaaaaatcttat

SEQ ID NO: 666 - RNA, 27 nt, synthetic construct
  source 1..27: mol_type = other RNA
atcattaaaagacacctaaaaatctta

SEQ ID NO: 667 - RNA, 27 nt, synthetic construct
  source 1..27: mol_type = other RNA
tatcattaaaagacacctaaaaatctt

SEQ ID NO: 668 - RNA, 27 nt, synthetic construct
  source 1..27: mol_type = other RNA
gtatctttaaaagacacctaaaaatct

SEQ ID NO: 669 - RNA, 27 nt, synthetic construct
  source 1..27: mol_type = other RNA
agtattattaaaagacacctaaaaatc

SEQ ID NO: 670 - RNA, 27 nt, synthetic construct
  source 1..27: mol_type = other RNA
cagtatcattaaaagacacctaaaaat

SEQ ID NO: 671 - RNA, 27 nt, synthetic construct
  source 1..27: mol_type = other RNA
acagtttcattaaaagacacctaaaaa

SEQ ID NO: 672 - RNA, 27 nt, synthetic construct
  source 1..27: mol_type = other RNA
gacagtatcattaaaagacacctaaaa

SEQ ID NO: 673 - RNA, 27 nt, synthetic construct
  source 1..27: mol_type = other RNA
agacattatcattaaaagacacctaaa

SEQ ID NO: 674 - RNA, 27 nt, synthetic construct
  source 1..27: mol_type = other RNA
tagactgtatcattaaaagacacctaa

SEQ ID NO: 675 - RNA, 27 nt, synthetic construct
  source 1..27: mol_type = other RNA
ttagatagtatcattaaaagacaccta

SEQ ID NO: 676 - RNA, 27 nt, synthetic construct
  source 1..27: mol_type = other RNA
cttagtcagtatcattaaaagacacct

SEQ ID NO: 677 - RNA, 27 nt, synthetic construct
  source 1..27: mol_type = other RNA
tcttatacagtatcattaaaagacacc

SEQ ID NO: 678 - RNA, 27 nt, synthetic construct
  source 1..27: mol_type = other RNA
ttctttgacagtatcattaaaagacac

SEQ ID NO: 679 - RNA, 27 nt, synthetic construct
  source 1..27: mol_type = other RNA
attcttagacagtatcattaaaagaca

SEQ ID NO: 680 - RNA, 27 nt, synthetic construct
  source 1..27: mol_type = other RNA
tattcttagacagtatcattaaaagac

SEQ ID NO: 681 - RNA, 27 nt, synthetic construct
  source 1..27: mol_type = other RNA
ttatttttagacagtatcattaaaaga

SEQ ID NO: 682 - RNA, 27 nt, synthetic construct
  source 1..27: mol_type = other RNA
attattcttagacagtatcattaaaag

SEQ ID NO: 683 - RNA, 27 nt, synthetic construct
  source 1..27: mol_type = other RNA
cattattcttagacagtatcattaaaa

SEQ ID NO: 684 - RNA, 27 nt, synthetic construct
  source 1..27: mol_type = other RNA
tcatttttcttagacagtatcattaaa

SEQ ID NO: 685 - RNA, 27 nt, synthetic construct
  source 1..27: mol_type = other RNA
gtcattattcttagacagtatcattaa

SEQ ID NO: 686 - RNA, 27 nt, synthetic construct
  source 1..27: mol_type = other RNA
cgtcattattcttagacagtatcatta

SEQ ID NO: 687 - RNA, 27 nt, synthetic construct
  source 1..27: mol_type = other RNA
acgtctttattcttagacagtatcatt

SEQ ID NO: 688 - RNA, 27 nt, synthetic construct
  source 1..27: mol_type = other RNA
tacgttattattcttagacagtatcat

SEQ ID NO: 689 - RNA, 27 nt, synthetic construct
  source 1..27: mol_type = other RNA
atacgtcattattcttagacagtatca

SEQ ID NO: 690 - RNA, 27 nt, synthetic construct
  source 1..27: mol_type = other RNA
aatacttcattattcttagacagtatc

SEQ ID NO: 691 - RNA, 27 nt, synthetic construct
  source 1..27: mol_type = other RNA
tatattttaacaaatttcacaatacgt

SEQ ID NO: 692 - RNA, 27 nt, synthetic construct
  source 1..27: mol_type = other RNA
atatatattaacaaatttcacaatacg

SEQ ID NO: 693 - RNA, 27 nt, synthetic construct
  source 1..27: mol_type = other RNA
tatatttattaacaaatttcacaatac

SEQ ID NO: 694 - RNA, 27 nt, synthetic construct
  source 1..27: mol_type = other RNA
aagtattatatatattaacaaatttca

SEQ ID NO: 695 - RNA, 27 nt, synthetic construct
  source 1..27: mol_type = other RNA
taagttttatatatattaacaaatttc

SEQ ID NO: 696 - RNA, 27 nt, synthetic construct
  source 1..27: mol_type = other RNA
ttaagtattatatatattaacaaattt

SEQ ID NO: 697 - RNA, 27 nt, synthetic construct
  source 1..27: mol_type = other RNA
tttaattattatatatattaacaaatt

SEQ ID NO: 698 - RNA, 27 nt, synthetic construct
  source 1..27: mol_type = other RNA
ttttatgtattatatatattaacaaat

SEQ ID NO: 699 - RNA, 27 nt, synthetic construct
  source 1..27: mol_type = other RNA
ttttttagtattatatatattaacaaa

SEQ ID NO: 700 - RNA, 27 nt, synthetic construct
  source 1..27: mol_type = other RNA
atttttaagtattatatatattaacaa

SEQ ID NO: 701 - RNA, 27 nt, synthetic construct
  source 1..27: mol_type = other RNA
tatttttaagtattatatatattaaca

SEQ ID NO: 702 - RNA, 27 nt, synthetic construct
  source 1..27: mol_type = other RNA
aggtgtatagtttcatgctcacatatt

SEQ ID NO: 703 - RNA, 27 nt, synthetic construct
  source 1..27: mol_type = other RNA
taggttcatagtttcatgctcacatat

SEQ ID NO: 704 - RNA, 27 nt, synthetic construct
  source 1..27: mol_type = other RNA
tatagttgcatagtttcatgctcacat

SEQ ID NO: 705 - RNA, 27 nt, synthetic construct
  source 1..27: mol_type = other RNA
ttatatgtgcatagtttcatgctcaca

SEQ ID NO: 706 - RNA, 27 nt, synthetic construct
  source 1..27: mol_type = other RNA
tttattggtgcatagtttcatgctcac

SEQ ID NO: 707 - RNA, 27 nt, synthetic construct
  source 1..27: mol_type = other RNA
atttataggtgcatagtttcatgctca

SEQ ID NO: 708 - RNA, 27 nt, synthetic construct
  source 1..27: mol_type = other RNA
tatttttaggtgcatagtttcatgctc

SEQ ID NO: 709 - RNA, 27 nt, synthetic construct
  source 1..27: mol_type = other RNA
gtatttataggtgcatagtttcatgct

SEQ ID NO: 710 - RNA, 27 nt, synthetic construct
  source 1..27: mol_type = other RNA
agtatttataggtgcatagtttcatgc

SEQ ID NO: 711 - RNA, 27 nt, synthetic construct
  source 1..27: mol_type = other RNA
tagtatttataggtgcatagtttcatg

SEQ ID NO: 712 - RNA, 27 nt, synthetic construct
  source 1..27: mol_type = other RNA
ttagtttttataggtgcatagtttcat

SEQ ID NO: 713 - RNA, 27 nt, synthetic construct
  source 1..27: mol_type = other RNA
tttagtatttataggtgcatagtttca

SEQ ID NO: 714 - RNA, 27 nt, synthetic construct
  source 1..27: mol_type = other RNA
atttattatttataggtgcatagtttc

SEQ ID NO: 715 - RNA, 27 nt, synthetic construct
  source 1..27: mol_type = other RNA
tattttgtatttataggtgcatagttt

SEQ ID NO: 716 - RNA, 27 nt, synthetic construct
  source 1..27: mol_type = other RNA
atatttagtatttataggtgcatagtt

SEQ ID NO: 717 - RNA, 27 nt, synthetic construct
  source 1..27: mol_type = other RNA
catatttagtatttataggtgcatagt

SEQ ID NO: 718 - RNA, 27 nt, synthetic construct
  source 1..27: mol_type = other RNA
tcatatttagtatttataggtgcatag

SEQ ID NO: 719 - RNA, 27 nt, synthetic construct
  source 1..27: mol_type = other RNA
taattttcaccatttatatacaaacac

SEQ ID NO: 720 - RNA, 27 nt, synthetic construct
  source 1..27: mol_type = other RNA
ttaattctcaccatttatatacaaaca

SEQ ID NO: 721 - RNA, 27 nt, synthetic construct
  source 1..27: mol_type = other RNA
tttaattctcaccatttatatacaaac

SEQ ID NO: 722 - RNA, 27 nt, synthetic construct
  source 1..27: mol_type = other RNA
ttttatttctcaccatttatatacaaa

SEQ ID NO: 723 - RNA, 27 nt, synthetic construct
  source 1..27: mol_type = other RNA
atttttattctcaccatttatatacaa

SEQ ID NO: 724 - RNA, 27 nt, synthetic construct
  source 1..27: mol_type = other RNA
tattttaattctcaccatttatataca

SEQ ID NO: 725 - RNA, 27 nt, synthetic construct
  source 1..27: mol_type = other RNA
ttattttaattctcaccatttatatac

SEQ ID NO: 726 - RNA, 27 nt, synthetic construct
  source 1..27: mol_type = other RNA
tttattttaattctcaccatttatata

SEQ ID NO: 727 - RNA, 27 nt, synthetic construct
  source 1..27: mol_type = other RNA
ttttattttaattctcaccatttatat

SEQ ID NO: 728 - RNA, 27 nt, synthetic construct
  source 1..27: mol_type = other RNA
gtttttttttaattctcaccatttata

SEQ ID NO: 729 - RNA, 27 nt, synthetic construct
  source 1..27: mol_type = other RNA
cgttttattttaattctcaccatttat

SEQ ID NO: 730 - RNA, 27 nt, synthetic construct
  source 1..27: mol_type = other RNA
acgttttattttaattctcaccattta

SEQ ID NO: 731 - RNA, 27 nt, synthetic construct
  source 1..27: mol_type = other RNA
aacgttttattttaattctcaccattt

SEQ ID NO: 732 - RNA, 27 nt, synthetic construct
  source 1..27: mol_type = other RNA
taacgttttattttaattctcaccatt

SEQ ID NO: 733 - RNA, 27 nt, synthetic construct
  source 1..27: mol_type = other RNA
ataactttttattttaattctcaccat

SEQ ID NO: 734 - RNA, 27 nt, synthetic construct
  source 1..27: mol_type = other RNA
ttaaattgagatgggataaaaataaaa

SEQ ID NO: 735 - RNA, 27 nt, synthetic construct
  source 1..27: mol_type = other RNA
tattatagtgagatgggataaaaataa

SEQ ID NO: 736 - RNA, 27 nt, synthetic construct
  source 1..27: mol_type = other RNA
ttatttaagtgagatgggataaaaata

SEQ ID NO: 737 - RNA, 27 nt, synthetic construct
  source 1..27: mol_type = other RNA
attattaaagtgagatgggataaaaat

SEQ ID NO: 738 - RNA, 27 nt, synthetic construct
  source 1..27: mol_type = other RNA
tattattaaagtgagatgggataaaaa

SEQ ID NO: 739 - RNA, 27 nt, synthetic construct
  source 1..27: mol_type = other RNA
ttatttttaaagtgagatgggataaaa

SEQ ID NO: 740 - RNA, 27 nt, synthetic construct
  source 1..27: mol_type = other RNA
tttattattaaagtgagatgggataaa

SEQ ID NO: 741 - RNA, 27 nt, synthetic construct
  source 1..27: mol_type = other RNA
ttttattattaaagtgagatgggataa

SEQ ID NO: 742 - RNA, 27 nt, synthetic construct
  source 1..27: mol_type = other RNA
ttttttttattaaagtgagatgggata

SEQ ID NO: 743 - RNA, 27 nt, synthetic construct
  source 1..27: mol_type = other RNA
atttttattattaaagtgagatgggat

SEQ ID NO: 744 - RNA, 27 nt, synthetic construct
  source 1..27: mol_type = other RNA
gatttttattattaaagtgagatggga

SEQ ID NO: 745 - RNA, 27 nt, synthetic construct
  source 1..27: mol_type = other RNA
tgatttttattattaaagtgagatggg

SEQ ID NO: 746 - RNA, 27 nt, synthetic construct
  source 1..27: mol_type = other RNA
atgatttttattattaaagtgagatgg

SEQ ID NO: 747 - RNA, 27 nt, synthetic construct
  source 1..27: mol_type = other RNA
catgatttttattattaaagtgagatg

SEQ ID NO: 748 - RNA, 27 nt, synthetic construct
  source 1..27: mol_type = other RNA
gcatgttttttattattaaagtgagat

SEQ ID NO: 749 - RNA, 27 nt, synthetic construct
  source 1..27: mol_type = other RNA
agcattatttttattattaaagtgaga

SEQ ID NO: 750 - RNA, 27 nt, synthetic construct
  source 1..27: mol_type = other RNA
aagcatgatttttattattaaagtgag

SEQ ID NO: 751 - RNA, 27 nt, synthetic construct
  source 1..27: mol_type = other RNA
ttctataattcctccttcttcaaatgg

SEQ ID NO: 752 - RNA, 27 nt, synthetic construct
  source 1..27: mol_type = other RNA
attttttctacctcttctaaaattcct

SEQ ID NO: 753 - RNA, 27 nt, synthetic construct
  source 1..27: mol_type = other RNA
atgtttcattttctctacctcttctaa

SEQ ID NO: 754 - RNA, 27 nt, synthetic construct
  source 1..27: mol_type = other RNA
aatgttccattttctctacctcttcta

SEQ ID NO: 755 - RNA, 27 nt, synthetic construct
  source 1..27: mol_type = other RNA
taatgttccattttctctacctcttct

SEQ ID NO: 756 - RNA, 27 nt, synthetic construct
  source 1..27: mol_type = other RNA
ttaattttccattttctctacctcttc

SEQ ID NO: 757 - RNA, 27 nt, synthetic construct
  source 1..27: mol_type = other RNA
gttaatgttccattttctctacctctt

SEQ ID NO: 758 - RNA, 27 nt, synthetic construct
  source 1..27: mol_type = other RNA
ggttattgttccattttctctacctct

SEQ ID NO: 759 - RNA, 27 nt, synthetic construct
  source 1..27: mol_type = other RNA
agggttaatgttccattttctctacct

SEQ ID NO: 760 - RNA, 27 nt, synthetic construct
  source 1..27: mol_type = other RNA
tagggttaatgttccattttctctacc

SEQ ID NO: 761 - RNA, 27 nt, synthetic construct
  source 1..27: mol_type = other RNA
gtaggtttaatgttccattttctctac

SEQ ID NO: 762 - RNA, 27 nt, synthetic construct
  source 1..27: mol_type = other RNA
tgtagtgttaatgttccattttctcta

SEQ ID NO: 763 - RNA, 27 nt, synthetic construct
  source 1..27: mol_type = other RNA
gtgtatggttaatgttccattttctct

SEQ ID NO: 764 - RNA, 27 nt, synthetic construct
  source 1..27: mol_type = other RNA
agtgttgggttaatgttccattttctc

SEQ ID NO: 765 - RNA, 27 nt, synthetic construct
  source 1..27: mol_type = other RNA
gagtgtagggttaatgttccattttct

SEQ ID NO: 766 - RNA, 27 nt, synthetic construct
  source 1..27: mol_type = other RNA
tccgattgtagggttaatgttccattt

SEQ ID NO: 767 - RNA, 27 nt, synthetic construct
  source 1..27: mol_type = other RNA
catactaaaacacacttctggcagtgt

SEQ ID NO: 768 - RNA, 27 nt, synthetic construct
  source 1..27: mol_type = other RNA
gcatatcaaaacacacttctggcagtg

SEQ ID NO: 769 - RNA, 25 nt, synthetic construct
  source 1..25: mol_type = other RNA
  modified_base 2: mod_base = OTHER; note = 2'-O-methyl modified nucleotide
  modified_base 4: mod_base = OTHER; note = 2'-O-methyl modified nucleotide
  modified_base 14: mod_base = OTHER; note = 2'-O-methyl modified nucleotide
  modified_base 16: mod_base = OTHER; note = 2'-O-methyl modified nucleotide
ttcatgaaaggactttcaaaggcca

SEQ ID NO: 770 - RNA, 25 nt, synthetic construct
  source 1..25: mol_type = other RNA
  modified_base 2: mod_base = OTHER; note = 2'-O-methyl modified nucleotide
  modified_base 4: mod_base = OTHER; note = 2'-O-methyl modified nucleotide
  modified_base 14: mod_base = OTHER; note = 2'-O-methyl modified nucleotide
  modified_base 16: mod_base = OTHER; note = 2'-O-methyl modified nucleotide
tcatgaaaggactttcaaaagccaa

SEQ ID NO: 771 - RNA, 25 nt, synthetic construct
  source 1..25: mol_type = other RNA
  modified_base 2: mod_base = OTHER; note = 2'-O-methyl modified nucleotide
  modified_base 4: mod_base = OTHER; note = 2'-O-methyl modified nucleotide
  modified_base 14: mod_base = OTHER; note = 2'-O-methyl modified nucleotide
  modified_base 16: mod_base = OTHER; note = 2'-O-methyl modified nucleotide
catgaaaggactttcaaagaccaag

SEQ ID NO: 772 - RNA, 25 nt, synthetic construct
  source 1..25: mol_type = other RNA
  modified_base 2: mod_base = OTHER; note = 2'-O-methyl modified nucleotide
  modified_base 4: mod_base = OTHER; note = 2'-O-methyl modified nucleotide
  modified_base 14: mod_base = OTHER; note = 2'-O-methyl modified nucleotide
  modified_base 16: mod_base = OTHER; note = 2'-O-methyl modified nucleotide
atgaaaggactttcaaaggacaagg

SEQ ID NO: 773 - RNA, 25 nt, synthetic construct
  source 1..25: mol_type = other RNA
  modified_base 2: mod_base = OTHER; note = 2'-O-methyl modified nucleotide
  modified_base 4: mod_base = OTHER; note = 2'-O-methyl modified nucleotide
  modified_base 14: mod_base = OTHER; note = 2'-O-methyl modified nucleotide
  modified_base 16: mod_base = OTHER; note = 2'-O-methyl modified nucleotide
tgaaaggactttcaaaggcaaagga

SEQ ID NO: 774 - RNA, 25 nt, synthetic construct
  source 1..25: mol_type = other RNA
  modified_base 2: mod_base = OTHER; note = 2'-O-methyl modified nucleotide
  modified_base 4: mod_base = OTHER; note = 2'-O-methyl modified nucleotide
  modified_base 14: mod_base = OTHER; note = 2'-O-methyl modified nucleotide
  modified_base 16: mod_base = OTHER; note = 2'-O-methyl modified nucleotide
gaaaggactttcaaaggccaaggag

SEQ ID NO: 775 - RNA, 25 nt, synthetic construct
  source 1..25: mol_type = other RNA
  modified_base 2: mod_base = OTHER; note = 2'-O-methyl modified nucleotide
  modified_base 4: mod_base = OTHER; note = 2'-O-methyl modified nucleotide
  modified_base 14: mod_base = OTHER; note = 2'-O-methyl modified nucleotide
  modified_base 16: mod_base = OTHER; note = 2'-O-methyl modified nucleotide
ggagggagttgtggctgctactgag

SEQ ID NO: 776 - RNA, 25 nt, synthetic construct
  source 1..25: mol_type = other RNA
  modified_base 2: mod_base = OTHER; note = 2'-O-methyl modified nucleotide
  modified_base 4: mod_base = OTHER; note = 2'-O-methyl modified nucleotide
  modified_base 14: mod_base = OTHER; note = 2'-O-methyl modified nucleotide
  modified_base 16: mod_base = OTHER; note = 2'-O-methyl modified nucleotide
gggagttgtggctgctgctaagaaa

SEQ ID NO: 777 - RNA, 25 nt, synthetic construct
  source 1..25: mol_type = other RNA
  modified_base 2: mod_base = OTHER; note = 2'-O-methyl modified nucleotide
  modified_base 4: mod_base = OTHER; note = 2'-O-methyl modified nucleotide
  modified_base 14: mod_base = OTHER; note = 2'-O-methyl modified nucleotide
  modified_base 16: mod_base = OTHER; note = 2'-O-methyl modified nucleotide
ggagttgtggctgctgctgagaaaa

SEQ ID NO: 778 - RNA, 25 nt, synthetic construct
  source 1..25: mol_type = other RNA
  modified_base 2: mod_base = OTHER; note = 2'-O-methyl modified nucleotide
  modified_base 4: mod_base = OTHER; note = 2'-O-methyl modified nucleotide
  modified_base 14: mod_base = OTHER; note = 2'-O-methyl modified nucleotide
  modified_base 16: mod_base = OTHER; note = 2'-O-methyl modified nucleotide
gagttgtggctgctgctgaaaaaac

SEQ ID NO: 779 - RNA, 25 nt, synthetic construct
  source 1..25: mol_type = other RNA
  modified_base 2: mod_base = OTHER; note = 2'-O-methyl modified nucleotide
  modified_base 4: mod_base = OTHER; note = 2'-O-methyl modified nucleotide
  modified_base 14: mod_base = OTHER; note = 2'-O-methyl modified nucleotide
  modified_base 16: mod_base = OTHER; note = 2'-O-methyl modified nucleotide
gttgtggctgctgctgagaaaacca

SEQ ID NO: 780 - RNA, 25 nt, synthetic construct
  source 1..25: mol_type = other RNA
  modified_base 2: mod_base = OTHER; note = 2'-O-methyl modified nucleotide
  modified_base 4: mod_base = OTHER; note = 2'-O-methyl modified nucleotide
  modified_base 14: mod_base = OTHER; note = 2'-O-methyl modified nucleotide
  modified_base 16: mod_base = OTHER; note = 2'-O-methyl modified nucleotide
ttgtggctgctgctgagaaaaccaa

SEQ ID NO: 781 - RNA, 25 nt, synthetic construct
  source 1..25: mol_type = other RNA
  modified_base 2: mod_base = OTHER; note = 2'-O-methyl modified nucleotide
  modified_base 4: mod_base = OTHER; note = 2'-O-methyl modified nucleotide
  modified_base 14: mod_base = OTHER; note = 2'-O-methyl modified nucleotide
  modified_base 16: mod_base = OTHER; note = 2'-O-methyl modified nucleotide
tgtggctgctgctgagaaaaccaaa

SEQ ID NO: 782 - RNA, 25 nt, synthetic construct
  source 1..25: mol_type = other RNA
  modified_base 2: mod_base = OTHER; note = 2'-O-methyl modified nucleotide
  modified_base 4: mod_base = OTHER; note = 2'-O-methyl modified nucleotide
  modified_base 14: mod_base = OTHER; note = 2'-O-methyl modified nucleotide
  modified_base 16: mod_base = OTHER; note = 2'-O-methyl modified nucleotide
gtggctgctgctgagaaaaacaaac

SEQ ID NO: 783 - RNA, 25 nt, synthetic construct
  source 1..25: mol_type = other RNA
  modified_base 2: mod_base = OTHER; note = 2'-O-methyl modified nucleotide
  modified_base 4: mod_base = OTHER; note = 2'-O-methyl modified nucleotide
  modified_base 14: mod_base = OTHER; note = 2'-O-methyl modified nucleotide
  modified_base 16: mod_base = OTHER; note = 2'-O-methyl modified nucleotide
tggctgctgctgagaaaacaaaaca

SEQ ID NO: 784 - RNA, 25 nt, synthetic construct
  source 1..25: mol_type = other RNA
  modified_base 2: mod_base = OTHER; note = 2'-O-methyl modified nucleotide
  modified_base 4: mod_base = OTHER; note = 2'-O-methyl modified nucleotide
  modified_base 14: mod_base = OTHER; note = 2'-O-methyl modified nucleotide
  modified_base 16: mod_base = OTHER; note = 2'-O-methyl modified nucleotide
ggctgctgctgagaaaaccaaacag

SEQ ID NO: 785 - RNA, 25 nt, synthetic construct
  source 1..25: mol_type = other RNA
  modified_base 2: mod_base = OTHER; note = 2'-O-methyl modified nucleotide
  modified_base 4: mod_base = OTHER; note = 2'-O-methyl modified nucleotide
  modified_base 14: mod_base = OTHER; note = 2'-O-methyl modified nucleotide
  modified_base 16: mod_base = OTHER; note = 2'-O-methyl modified nucleotide
caacagtggctgagaagacaaaaga

SEQ ID NO: 786 - RNA, 25 nt, synthetic construct
  source 1..25: mol_type = other RNA
  modified_base 2: mod_base = OTHER; note = 2'-O-methyl modified nucleotide
  modified_base 4: mod_base = OTHER; note = 2'-O-methyl modified nucleotide
  modified_base 14: mod_base = OTHER; note = 2'-O-methyl modified nucleotide
  modified_base 16: mod_base = OTHER; note = 2'-O-methyl modified nucleotide
aacagtggctgagaagaccaaagag

SEQ ID NO: 787 - RNA, 25 nt, synthetic construct
  source 1..25: mol_type = other RNA
  modified_base 2: mod_base = OTHER; note = 2'-O-methyl modified nucleotide
  modified_base 4: mod_base = OTHER; note = 2'-O-methyl modified nucleotide
  modified_base 14: mod_base = OTHER; note = 2'-O-methyl modified nucleotide
  modified_base 16: mod_base = OTHER; note = 2'-O-methyl modified nucleotide
acagtggctgagaagaccaaagagc

SEQ ID NO: 788 - RNA, 25 nt, synthetic construct
  source 1..25: mol_type = other RNA
  modified_base 2: mod_base = OTHER; note = 2'-O-methyl modified nucleotide
  modified_base 4: mod_base = OTHER; note = 2'-O-methyl modified nucleotide
  modified_base 14: mod_base = OTHER; note = 2'-O-methyl modified nucleotide
  modified_base 16: mod_base = OTHER; note = 2'-O-methyl modified nucleotide
cagtggctgagaagaccaaagagca

SEQ ID NO: 789 - RNA, 25 nt, synthetic construct
  source 1..25: mol_type = other RNA
  modified_base 2: mod_base = OTHER; note = 2'-O-methyl modified nucleotide
  modified_base 4: mod_base = OTHER; note = 2'-O-methyl modified nucleotide
  modified_base 14: mod_base = OTHER; note = 2'-O-methyl modified nucleotide
  modified_base 16: mod_base = OTHER; note = 2'-O-methyl modified nucleotide
agtggctgagaagaccaaaaagcaa

SEQ ID NO: 790 - RNA, 25 nt, synthetic construct
  source 1..25: mol_type = other RNA
  modified_base 2: mod_base = OTHER; note = 2'-O-methyl modified nucleotide
  modified_base 4: mod_base = OTHER; note = 2'-O-methyl modified nucleotide
  modified_base 14: mod_base = OTHER; note = 2'-O-methyl modified nucleotide
  modified_base 16: mod_base = OTHER; note = 2'-O-methyl modified nucleotide
gtggctgagaagaccaaagagcaag

SEQ ID NO: 791 - DNA, 25 bp, synthetic construct
  source 1..25: mol_type = other DNA
  modified_base 2: mod_base = OTHER; note = 2'-O-methyl modified nucleotide
  modified_base 4: mod_base = OTHER; note = 2'-O-methyl modified nucleotide
  modified_base 14: mod_base = OTHER; note = 2'-O-methyl modified nucleotide
  modified_base 16: mod_base = OTHER; note = 2'-O-methyl modified nucleotide
  misc_feature 1..24: note = RNA
  misc_feature 25: note = DNA
tggctgagaagaccaaagaacaagt

SEQ ID NO: 792 - DNA, 25 bp, synthetic construct
  source 1..25: mol_type = other DNA
  modified_base 2: mod_base = OTHER; note = 2'-O-methyl modified nucleotide
  modified_base 4: mod_base = OTHER; note = 2'-O-methyl modified nucleotide
  modified_base 14: mod_base = OTHER; note = 2'-O-methyl modified nucleotide
  modified_base 16: mod_base = OTHER; note = 2'-O-methyl modified nucleotide
  misc_feature 1..23: note = RNA
  misc_feature 24: note = DNA
  misc_feature 25: note = RNA
ggctgagaagaccaaagagaaagtg

SEQ ID NO: 793 - RNA, 25 nt, synthetic construct
  source 1..25: mol_type = other RNA
  modified_base 2: mod_base = OTHER; note = 2'-O-methyl modified nucleotide
  modified_base 4: mod_base = OTHER; note = 2'-O-methyl modified nucleotide
  modified_base 14: mod_base = OTHER; note = 2'-O-methyl modified nucleotide
  modified_base 16: mod_base = OTHER; note = 2'-O-methyl modified nucleotide
gctgagaagaccaaagagcaagtga

SEQ ID NO: 794 - RNA, 25 nt, synthetic construct
  source 1..25: mol_type = other RNA
  modified_base 2: mod_base = OTHER; note = 2'-O-methyl modified nucleotide
  modified_base 4: mod_base = OTHER; note = 2'-O-methyl modified nucleotide
  modified_base 14: mod_base = OTHER; note = 2'-O-methyl modified nucleotide
  modified_base 16: mod_base = OTHER; note = 2'-O-methyl modified nucleotide
ctgagaagaccaaagagcaagtgac

SEQ ID NO: 795 - RNA, 25 nt, synthetic construct
  source 1..25: mol_type = other RNA
  modified_base 2: mod_base = OTHER; note = 2'-O-methyl modified nucleotide
  modified_base 4: mod_base = OTHER; note = 2'-O-methyl modified nucleotide
  modified_base 14: mod_base = OTHER; note = 2'-O-methyl modified nucleotide
  modified_base 16: mod_base = OTHER; note = 2'-O-methyl modified nucleotide
tgagaagaccaaagagcaaatgaca

SEQ ID NO: 796 - RNA, 25 nt, synthetic construct
  source 1..25: mol_type = other RNA
  modified_base 2: mod_base = OTHER; note = 2'-O-methyl modified nucleotide
  modified_base 4: mod_base = OTHER; note = 2'-O-methyl modified nucleotide
  modified_base 14: mod_base = OTHER; note = 2'-O-methyl modified nucleotide
  modified_base 16: mod_base = OTHER; note = 2'-O-methyl modified nucleotide
gagaagaccaaagagcaagagacaa

SEQ ID NO: 797 - RNA, 25 nt, synthetic construct
  source 1..25: mol_type = other RNA
  modified_base 2: mod_base = OTHER; note = 2'-O-methyl modified nucleotide
  modified_base 4: mod_base = OTHER; note = 2'-O-methyl modified nucleotide
  modified_base 14: mod_base = OTHER; note = 2'-O-methyl modified nucleotide
  modified_base 16: mod_base = OTHER; note = 2'-O-methyl modified nucleotide
agaagaccaaagagcaagtaacaaa

SEQ ID NO: 798 - DNA, 25 bp, synthetic construct
  source 1..25: mol_type = other DNA
  modified_base 2: mod_base = OTHER; note = 2'-O-methyl modified nucleotide
  modified_base 4: mod_base = OTHER; note = 2'-O-methyl modified nucleotide
  modified_base 14: mod_base = OTHER; note = 2'-O-methyl modified nucleotide
  modified_base 16: mod_base = OTHER; note = 2'-O-methyl modified nucleotide
  misc_feature 1..24: note = RNA
  misc_feature 25: note = DNA
gaagaccaaagagcaagtgacaaat

SEQ ID NO: 799 - DNA, 25 bp, synthetic construct
  source 1..25: mol_type = other DNA
  modified_base 2: mod_base = OTHER; note = 2'-O-methyl modified nucleotide
  modified_base 4: mod_base = OTHER; note = 2'-O-methyl modified nucleotide
  modified_base 14: mod_base = OTHER; note = 2'-O-methyl modified nucleotide
  modified_base 16: mod_base = OTHER; note = 2'-O-methyl modified nucleotide
  misc_feature 1..23: note = RNA
  misc_feature 24: note = DNA
  misc_feature 25: note = RNA
aagaccaaagagcaagtgaaaaatg

SEQ ID NO: 800 - DNA, 25 bp, synthetic construct
  source 1..25: mol_type = other DNA
  modified_base 2: mod_base = OTHER; note = 2'-O-methyl modified nucleotide
  modified_base 4: mod_base = OTHER; note = 2'-O-methyl modified nucleotide
  modified_base 14: mod_base = OTHER; note = 2'-O-methyl modified nucleotide
  modified_base 16: mod_base = OTHER; note = 2'-O-methyl modified nucleotide
  misc_feature 1..24: note = RNA
  misc_feature 25: note = DNA
agaccaaagagcaagtgacaaatgt

SEQ ID NO: 801 - DNA, 25 bp, synthetic construct
  source 1..25: mol_type = other DNA
  modified_base 2: mod_base = OTHER; note = 2'-O-methyl modified nucleotide
  modified_base 4: mod_base = OTHER; note = 2'-O-methyl modified nucleotide
  modified_base 14: mod_base = OTHER; note = 2'-O-methyl modified nucleotide
  modified_base 16: mod_base = OTHER; note = 2'-O-methyl modified nucleotide
  misc_feature 1..23: note = RNA
  misc_feature 24..25: note = DNA
gaccaaagagcaagtgacaaatgtt

SEQ ID NO: 802 - DNA, 25 bp, synthetic construct
  source 1..25: mol_type = other DNA
  modified_base 2: mod_base = OTHER; note = 2'-O-methyl modified nucleotide
  modified_base 4: mod_base = OTHER; note = 2'-O-methyl modified nucleotide
  modified_base 14: mod_base = OTHER; note = 2'-O-methyl modified nucleotide
  modified_base 16: mod_base = OTHER; note = 2'-O-methyl modified nucleotide
  misc_feature 1..23: note = RNA
  misc_feature 24: note = DNA
  misc_feature 25: note = RNA
accaaagagcaagtgacaaatgttg

SEQ ID NO: 803 - RNA, 25 nt, synthetic construct
  source 1..25: mol_type = other RNA
  modified_base 2: mod_base = OTHER; note = 2'-O-methyl modified nucleotide
  modified_base 4: mod_base = OTHER; note = 2'-O-methyl modified nucleotide
  modified_base 14: mod_base = OTHER; note = 2'-O-methyl modified nucleotide
  modified_base 16: mod_base = OTHER; note = 2'-O-methyl modified nucleotide
ccaaagagcaagtgacaaaagttgg

SEQ ID NO: 804 - RNA, 25 nt, synthetic construct
  source 1..25: mol_type = other RNA
  modified_base 2: mod_base = OTHER; note = 2'-O-methyl modified nucleotide
  modified_base 4: mod_base = OTHER; note = 2'-O-methyl modified nucleotide
  modified_base 14: mod_base = OTHER; note = 2'-O-methyl modified nucleotide
  modified_base 16: mod_base = OTHER; note = 2'-O-methyl modified nucleotide
caaagagcaagtgacaaatattgga

SEQ ID NO: 805 - RNA, 25 nt, synthetic construct
  source 1..25: mol_type = other RNA
  modified_base 2: mod_base = OTHER; note = 2'-O-methyl modified nucleotide
  modified_base 4: mod_base = OTHER; note = 2'-O-methyl modified nucleotide
  modified_base 14: mod_base = OTHER; note = 2'-O-methyl modified nucleotide
  modified_base 16: mod_base = OTHER; note = 2'-O-methyl modified nucleotide
aaagagcaagtgacaaatgatggag

SEQ ID NO: 806 - RNA, 25 nt, synthetic construct
  source 1..25: mol_type = other RNA
  modified_base 2: mod_base = OTHER; note = 2'-O-methyl modified nucleotide
  modified_base 4: mod_base = OTHER; note = 2'-O-methyl modified nucleotide
  modified_base 14: mod_base = OTHER; note = 2'-O-methyl modified nucleotide
  modified_base 16: mod_base = OTHER; note = 2'-O-methyl modified nucleotide
aagagcaagtgacaaatgtaggagg

SEQ ID NO: 807 - RNA, 25 nt, synthetic construct
  source 1..25: mol_type = other RNA
  modified_base 2: mod_base = OTHER; note = 2'-O-methyl modified nucleotide
  modified_base 4: mod_base = OTHER; note = 2'-O-methyl modified nucleotide
  modified_base 14: mod_base = OTHER; note = 2'-O-methyl modified nucleotide
  modified_base 16: mod_base = OTHER; note = 2'-O-methyl modified nucleotide
agagcaagtgacaaatgttagagga

SEQ ID NO: 808 - RNA, 25 nt, synthetic construct
  source 1..25: mol_type = other RNA
  modified_base 2: mod_base = OTHER; note = 2'-O-methyl modified nucleotide
  modified_base 4: mod_base = OTHER; note = 2'-O-methyl modified nucleotide
  modified_base 14: mod_base = OTHER; note = 2'-O-methyl modified nucleotide
  modified_base 16: mod_base = OTHER; note = 2'-O-methyl modified nucleotide
gagcaagtgacaaatgttgaaggag

SEQ ID NO: 809 - RNA, 25 nt, synthetic construct
  source 1..25: mol_type = other RNA
  modified_base 2: mod_base = OTHER; note = 2'-O-methyl modified nucleotide
  modified_base 4: mod_base = OTHER; note = 2'-O-methyl modified nucleotide
  modified_base 14: mod_base = OTHER; note = 2'-O-methyl modified nucleotide
  modified_base 16: mod_base = OTHER; note = 2'-O-methyl modified nucleotide
agcaagtgacaaatgttggaggagc

SEQ ID NO: 810 - RNA, 25 nt, synthetic construct
  source 1..25: mol_type = other RNA
  modified_base 2: mod_base = OTHER; note = 2'-O-methyl modified nucleotide
  modified_base 4: mod_base = OTHER; note = 2'-O-methyl modified nucleotide
  modified_base 14: mod_base = OTHER; note = 2'-O-methyl modified nucleotide
  modified_base 16: mod_base = OTHER; note = 2'-O-methyl modified nucleotide
gcaagtgacaaatgttggaagagca

SEQ ID NO: 811 - RNA, 25 nt, synthetic construct
  source 1..25: mol_type = other RNA
  modified_base 2: mod_base = OTHER; note = 2'-O-methyl modified nucleotide
  modified_base 4: mod_base = OTHER; note = 2'-O-methyl modified nucleotide
  modified_base 14: mod_base = OTHER; note = 2'-O-methyl modified nucleotide
  modified_base 16: mod_base = OTHER; note = 2'-O-methyl modified nucleotide
caagtgacaaatgttggagaagcag

SEQ ID NO: 812 - DNA, 25 bp, synthetic construct
  source 1..25: mol_type = other DNA
  modified_base 2: mod_base = OTHER; note = 2'-O-methyl modified nucleotide
  modified_base 4: mod_base = OTHER; note = 2'-O-methyl modified nucleotide
  modified_base 14: mod_base = OTHER; note = 2'-O-methyl modified nucleotide
  modified_base 16: mod_base = OTHER; note = 2'-O-methyl modified nucleotide
  misc_feature 1..24: note = RNA
  misc_feature 25: note = DNA
aagtgacaaatgttggaggagcagt

SEQ ID NO: 813 - DNA, 25 bp, synthetic construct
  source 1..25: mol_type = other DNA
  modified_base 2: mod_base = OTHER; note = 2'-O-methyl modified nucleotide
  modified_base 4: mod_base = OTHER; note = 2'-O-methyl modified nucleotide
  modified_base 14: mod_base = OTHER; note = 2'-O-methyl modified nucleotide
  modified_base 16: mod_base = OTHER; note = 2'-O-methyl modified nucleotide
  misc_feature 1..23: note = RNA
  misc_feature 24: note = DNA
  misc_feature 25: note = RNA
agtgacaaatgttggaggaacagtg

SEQ ID NO: 814 - RNA, 25 nt, synthetic construct
  source 1..25: mol_type = other RNA
  modified_base 2: mod_base = OTHER; note = 2'-O-methyl modified nucleotide
  modified_base 4: mod_base = OTHER; note = 2'-O-methyl modified nucleotide
  modified_base 14: mod_base = OTHER; note = 2'-O-methyl modified nucleotide
  modified_base 16: mod_base = OTHER; note = 2'-O-methyl modified nucleotide
gtgacaaatgttggaggagaagtgg

SEQ ID NO: 815 - DNA, 25 bp, synthetic construct
  source 1..25: mol_type = other DNA
  modified_base 2: mod_base = OTHER; note = 2'-O-methyl modified nucleotide
  modified_base 4: mod_base = OTHER; note = 2'-O-methyl modified nucleotide
  modified_base 14: mod_base = OTHER; note = 2'-O-methyl modified nucleotide
  modified_base 16: mod_base = OTHER; note = 2'-O-methyl modified nucleotide
  misc_feature 1..24: note = RNA
  misc_feature 25: note = DNA
tgacaaatgttggaggagcagtggt

SEQ ID NO: 816 - RNA, 25 nt, synthetic construct
  source 1..25: mol_type = other RNA
  modified_base 2: mod_base = OTHER; note = 2'-O-methyl modified nucleotide
  modified_base 4: mod_base = OTHER; note = 2'-O-methyl modified nucleotide
  modified_base 14: mod_base = OTHER; note = 2'-O-methyl modified nucleotide
  modified_base 16: mod_base = OTHER; note = 2'-O-methyl modified nucleotide
gtacaagtgctcagttccaatgtgc

SEQ ID NO: 817 - RNA, 25 nt, synthetic construct
  source 1..25: mol_type = other RNA
  modified_base 2: mod_base = OTHER; note = 2'-O-methyl modified nucleotide
  modified_base 4: mod_base = OTHER; note = 2'-O-methyl modified nucleotide
  modified_base 14: mod_base = OTHER; note = 2'-O-methyl modified nucleotide
  modified_base 16: mod_base = OTHER; note = 2'-O-methyl modified nucleotide
tacaagtgctcagttccaaagtgcc

SEQ ID NO: 818 - RNA, 25 nt, synthetic construct
  source 1..25: mol_type = other RNA
  modified_base 2: mod_base = OTHER; note = 2'-O-methyl modified nucleotide
  modified_base 4: mod_base = OTHER; note = 2'-O-methyl modified nucleotide
  modified_base 14: mod_base = OTHER; note = 2'-O-methyl modified nucleotide
  modified_base 16: mod_base = OTHER; note = 2'-O-methyl modified nucleotide
acaagtgctcagttccaatatgccc

SEQ ID NO: 819 - RNA, 25 nt, synthetic construct
  source 1..25: mol_type = other RNA
  modified_base 2: mod_base = OTHER; note = 2'-O-methyl modified nucleotide
  modified_base 4: mod_base = OTHER; note = 2'-O-methyl modified nucleotide
  modified_base 14: mod_base = OTHER; note = 2'-O-methyl modified nucleotide
  modified_base 16: mod_base = OTHER; note = 2'-O-methyl modified nucleotide
caagtgctcagttccaatgagccca

SEQ ID NO: 820 - RNA, 25 nt, synthetic construct
  source 1..25: mol_type = other RNA
  modified_base 2: mod_base = OTHER; note = 2'-O-methyl modified nucleotide
  modified_base 4: mod_base = OTHER; note = 2'-O-methyl modified nucleotide
  modified_base 14: mod_base = OTHER; note = 2'-O-methyl modified nucleotide
  modified_base 16: mod_base = OTHER; note = 2'-O-methyl modified nucleotide
aagtgctcagttccaatgtacccag

SEQ ID NO: 821 - DNA, 25 bp, synthetic construct
  source 1..25: mol_type = other DNA
  modified_base 2: mod_base = OTHER; note = 2'-O-methyl modified nucleotide
  modified_base 4: mod_base = OTHER; note = 2'-O-methyl modified nucleotide
  modified_base 14: mod_base = OTHER; note = 2'-O-methyl modified nucleotide
  modified_base 16: mod_base = OTHER; note = 2'-O-methyl modified nucleotide
  misc_feature 1..24: note = RNA
  misc_feature 25: note = DNA
agtgctcagttccaatgtgaccagt

SEQ ID NO: 822 - DNA, 25 bp, synthetic construct
  source 1..25: mol_type = other DNA
  modified_base 2: mod_base = OTHER; note = 2'-O-methyl modified nucleotide
  modified_base 4: mod_base = OTHER; note = 2'-O-methyl modified nucleotide
  modified_base 14: mod_base = OTHER; note = 2'-O-methyl modified nucleotide
  modified_base 16: mod_base = OTHER; note = 2'-O-methyl modified nucleotide
  misc_feature 1..23: note = RNA
  misc_feature 24: note = DNA
  misc_feature 25: note = RNA
gtgctcagttccaatgtgcacagtc

SEQ ID NO: 823 - RNA, 25 nt, synthetic construct
  source 1..25: mol_type = other RNA
  modified_base 2: mod_base = OTHER; note = 2'-O-methyl modified nucleotide
  modified_base 4: mod_base = OTHER; note = 2'-O-methyl modified nucleotide
  modified_base 14: mod_base = OTHER; note = 2'-O-methyl modified nucleotide
  modified_base 16: mod_base = OTHER; note = 2'-O-methyl modified nucleotide
tgctcagttccaatgtgccaagtca

SEQ ID NO: 824 - DNA, 25 bp, synthetic construct
  source 1..25: mol_type = other DNA
  modified_base 2: mod_base = OTHER; note = 2'-O-methyl modified nucleotide
  modified_base 4: mod_base = OTHER; note = 2'-O-methyl modified nucleotide
  modified_base 14: mod_base = OTHER; note = 2'-O-methyl modified nucleotide
  modified_base 16: mod_base = OTHER; note = 2'-O-methyl modified nucleotide
  misc_feature 1..24: note = RNA
  misc_feature 25: note = DNA
gctcagttccaatgtgcccagtcat

SEQ ID NO: 825 - DNA, 25 bp, synthetic construct
  source 1..25: mol_type = other DNA
  modified_base 2: mod_base = OTHER; note = 2'-O-methyl modified nucleotide
  modified_base 4: mod_base = OTHER; note = 2'-O-methyl modified nucleotide
  modified_base 14: mod_base = OTHER; note = 2'-O-methyl modified nucleotide
  modified_base 16: mod_base = OTHER; note = 2'-O-methyl modified nucleotide
  misc_feature 1..23: note = RNA
  misc_feature 24: note = DNA
  misc_feature 25: note = RNA
ctcagttccaatgtgcccaatcatg

SEQ ID NO: 826 - RNA, 25 nt, synthetic construct
  source 1..25: mol_type = other RNA
  modified_base 2: mod_base = OTHER; note = 2'-O-methyl modified nucleotide
  modified_base 4: mod_base = OTHER; note = 2'-O-methyl modified nucleotide
  modified_base 14: mod_base = OTHER; note = 2'-O-methyl modified nucleotide
  modified_base 16: mod_base = OTHER; note = 2'-O-methyl modified nucleotide
tcagttccaatgtgcccagacatga

SEQ ID NO: 827 - RNA, 25 nt, synthetic construct
  source 1..25: mol_type = other RNA
  modified_base 2: mod_base = OTHER; note = 2'-O-methyl modified nucleotide
  modified_base 4: mod_base = OTHER; note = 2'-O-methyl modified nucleotide
  modified_base 14: mod_base = OTHER; note = 2'-O-methyl modified nucleotide
  modified_base 16: mod_base = OTHER; note = 2'-O-methyl modified nucleotide
cagttccaatgtgcccagtaatgac

SEQ ID NO: 828 - RNA, 25 nt, synthetic construct
  source 1..25: mol_type = other RNA
  modified_base 2: mod_base = OTHER; note = 2'-O-methyl modified nucleotide
  modified_base 4: mod_base = OTHER; note = 2'-O-methyl modified nucleotide
  modified_base 14: mod_base = OTHER; note = 2'-O-methyl modified nucleotide
  modified_base 16: mod_base = OTHER; note = 2'-O-methyl modified nucleotide
agttccaatgtgcccagtcatgaca

SEQ ID NO: 829 - DNA, 25 bp, synthetic construct
  source 1..25: mol_type = other DNA
  modified_base 2: mod_base = OTHER; note = 2'-O-methyl modified nucleotide
  modified_base 4: mod_base = OTHER; note = 2'-O-methyl modified nucleotide
  modified_base 14: mod_base = OTHER; note = 2'-O-methyl modified nucleotide
  modified_base 16: mod_base = OTHER; note = 2'-O-methyl modified nucleotide
  misc_feature 1..24: note = RNA
  misc_feature 25: note = DNA
gttccaatgtgcccagtcaagacat

SEQ ID NO: 830 - DNA, 25 bp, synthetic construct
  source 1..25: mol_type = other DNA
  modified_base 2: mod_base = OTHER; note = 2'-O-methyl modified nucleotide
  modified_base 4: mod_base = OTHER; note = 2'-O-methyl modified nucleotide
  modified_base 14: mod_base = OTHER; note = 2'-O-methyl modified nucleotide
  modified_base 16: mod_base = OTHER; note = 2'-O-methyl modified nucleotide
  misc_feature 1..23: note = RNA
  misc_feature 24..25: note = DNA
ttccaatgtgcccagtcataacatt

SEQ ID NO: 831 - DNA, 25 bp, synthetic construct
  source 1..25: mol_type = other DNA
  modified_base 2: mod_base = OTHER; note = 2'-O-methyl modified nucleotide
  modified_base 4: mod_base = OTHER; note = 2'-O-methyl modified nucleotide
  modified_base 14: mod_base = OTHER; note = 2'-O-methyl modified nucleotide
  modified_base 16: mod_base = OTHER; note = 2'-O-methyl modified nucleotide
  misc_feature 1..23: note = RNA
  misc_feature 24..25: note = DNA
tccaatgtgcccagtcatgacattt

SEQ ID NO: 832 - DNA, 25 bp, synthetic construct
  source 1..25: mol_type = other DNA
  modified_base 2: mod_base = OTHER; note = 2'-O-methyl modified nucleotide
  modified_base 4: mod_base = OTHER; note = 2'-O-methyl modified nucleotide
  modified_base 14: mod_base = OTHER; note = 2'-O-methyl modified nucleotide
  modified_base 16: mod_base = OTHER; note = 2'-O-methyl modified nucleotide
  misc_feature 1..23: note = RNA
  misc_feature 24: note = DNA
  misc_feature 25: note = RNA
ccaatgtgcccagtcatgaaatttc

SEQ ID NO: 833 - DNA, 25 bp, synthetic construct
  source 1..25: mol_type = other DNA
  modified_base 2: mod_base = OTHER; note = 2'-O-methyl modified nucleotide
  modified_base 4: mod_base = OTHER; note = 2'-O-methyl modified nucleotide
  modified_base 14: mod_base = OTHER; note = 2'-O-methyl modified nucleotide
  modified_base 16: mod_base = OTHER; note = 2'-O-methyl modified nucleotide
  misc_feature 1..24: note = RNA
  misc_feature 25: note = DNA
caatgtgcccagtcatgacatttct

SEQ ID NO: 834 - RNA, 25 nt, synthetic construct
  source 1..25: mol_type = other RNA
  modified_base 2: mod_base = OTHER; note = 2'-O-methyl modified nucleotide
  modified_base 4: mod_base = OTHER; note = 2'-O-methyl modified nucleotide
  modified_base 14: mod_base = OTHER; note = 2'-O-methyl modified nucleotide
  modified_base 16: mod_base = OTHER; note = 2'-O-methyl modified nucleotide
aagtcttccatcagcagtgattgaa

SEQ ID NO: 835 - RNA, 25 nt, synthetic construct
  source 1..25: mol_type = other RNA
  modified_base 2: mod_base = OTHER; note = 2'-O-methyl modified nucleotide
  modified_base 4: mod_base = OTHER; note = 2'-O-methyl modified nucleotide
  modified_base 14: mod_base = OTHER; note = 2'-O-methyl modified nucleotide
  modified_base 16: mod_base = OTHER; note = 2'-O-methyl modified nucleotide
agtcttccatcagcagtgaatgaag

SEQ ID NO: 836 - DNA, 25 bp, synthetic construct
  source 1..25: mol_type = other DNA
  modified_base 2: mod_base = OTHER; note = 2'-O-methyl modified nucleotide
  modified_base 4: mod_base = OTHER; note = 2'-O-methyl modified nucleotide
  modified_base 14: mod_base = OTHER; note = 2'-O-methyl modified nucleotide
  modified_base 16: mod_base = OTHER; note = 2'-O-methyl modified nucleotide
  misc_feature 1..24: note = RNA
  misc_feature 25: note = DNA
gtcttccatcagcagtgatagaagt

SEQ ID NO: 837 - DNA, 25 bp, synthetic construct
  source 1..25: mol_type = other DNA
  modified_base 2: mod_base = OTHER; note = 2'-O-methyl modified nucleotide
  modified_base 4: mod_base = OTHER; note = 2'-O-methyl modified nucleotide
  modified_base 14: mod_base = OTHER; note = 2'-O-methyl modified nucleotide
  modified_base 16: mod_base = OTHER; note = 2'-O-methyl modified nucleotide
  misc_feature 1..23: note = RNA
  misc_feature 24: note = DNA
  misc_feature 25: note = RNA
aaaacacctaagtgactacaactta

SEQ ID NO: 838 - DNA, 25 bp, synthetic construct
  source 1..25: mol_type = other DNA
  modified_base 2: mod_base = OTHER; note = 2'-O-methyl modified nucleotide
  modified_base 4: mod_base = OTHER; note = 2'-O-methyl modified nucleotide
  modified_base 14: mod_base = OTHER; note = 2'-O-methyl modified nucleotide
  modified_base 16: mod_base = OTHER; note = 2'-O-methyl modified nucleotide
  misc_feature 1..24: note = RNA
  misc_feature 25: note = DNA
aaacacctaagtgactaccacttat

SEQ ID NO: 839 - DNA, 25 bp, synthetic construct
  source 1..25: mol_type = other DNA
  modified_base 2: mod_base = OTHER; note = 2'-O-methyl modified nucleotide
  modified_base 4: mod_base = OTHER; note = 2'-O-methyl modified nucleotide
  modified_base 14: mod_base = OTHER; note = 2'-O-methyl modified nucleotide
  modified_base 16: mod_base = OTHER; note = 2'-O-methyl modified nucleotide
  misc_feature 1..23: note = RNA
  misc_feature 24..25: note = DNA
aacacctaagtgactaccaattatt

SEQ ID NO: 840 - DNA, 25 bp, synthetic construct
  source 1..25: mol_type = other DNA
  modified_base 2: mod_base = OTHER; note = 2'-O-methyl modified nucleotide
  modified_base 4: mod_base = OTHER; note = 2'-O-methyl modified nucleotide
  modified_base 14: mod_base = OTHER; note = 2'-O-methyl modified nucleotide
  modified_base 16: mod_base = OTHER; note = 2'-O-methyl modified nucleotide
  misc_feature 1..23: note = RNA
  misc_feature 24..25: note = DNA
acacctaagtgactaccacatattt

SEQ ID NO: 841 - DNA, 25 bp, synthetic construct
  source 1..25: mol_type = other DNA
  modified_base 2: mod_base = OTHER; note = 2'-O-methyl modified nucleotide
  modified_base 4: mod_base = OTHER; note = 2'-O-methyl modified nucleotide
  modified_base 14: mod_base = OTHER; note = 2'-O-methyl modified nucleotide
  modified_base 16: mod_base = OTHER; note = 2'-O-methyl modified nucleotide
  misc_feature 1..23: note = RNA
  misc_feature 24: note = DNA
  misc_feature 25: note = RNA
cacctaagtgactaccactaatttc

SEQ ID NO: 842 - DNA, 25 bp, synthetic construct
  source 1..25: mol_type = other DNA
  modified_base 2: mod_base = OTHER; note = 2'-O-methyl modified nucleotide
  modified_base 4: mod_base = OTHER; note = 2'-O-methyl modified nucleotide
  modified_base 14: mod_base = OTHER; note = 2'-O-methyl modified nucleotide
  modified_base 16: mod_base = OTHER; note = 2'-O-methyl modified nucleotide
  misc_feature 1..24: note = RNA
  misc_feature 25: note = DNA
acctaagtgactaccacttatttct

SEQ ID NO: 843 - DNA, 25 bp, synthetic construct
  source 1..25: mol_type = other DNA
  modified_base 2: mod_base = OTHER; note = 2'-O-methyl modified nucleotide
  modified_base 4: mod_base = OTHER; note = 2'-O-methyl modified nucleotide
  modified_base 14: mod_base = OTHER; note = 2'-O-methyl modified nucleotide
  modified_base 16: mod_base = OTHER; note = 2'-O-methyl modified nucleotide
  misc_feature 1..23: note = RNA
  misc_feature 24: note = DNA
  misc_feature 25: note = RNA
cctaagtgactaccacttaattcta

SEQ ID NO: 844 - RNA, 25 nt, synthetic construct
  source 1..25: mol_type = other RNA
  modified_base 2: mod_base = OTHER; note = 2'-O-methyl modified nucleotide
  modified_base 4: mod_base = OTHER; note = 2'-O-methyl modified nucleotide
  modified_base 14: mod_base = OTHER; note = 2'-O-methyl modified nucleotide
  modified_base 16: mod_base = OTHER; note = 2'-O-methyl modified nucleotide
ctaagtgactaccacttatatctaa

SEQ ID NO: 845 - RNA, 25 nt, synthetic construct
  source 1..25: mol_type = other RNA
  modified_base 2: mod_base = OTHER; note = 2'-O-methyl modified nucleotide
  modified_base 4: mod_base = OTHER; note = 2'-O-methyl modified nucleotide
  modified_base 14: mod_base = OTHER; note = 2'-O-methyl modified nucleotide
  modified_base 16: mod_base = OTHER; note = 2'-O-methyl modified nucleotide
taagtgactaccacttattactaaa

SEQ ID NO: 846 - DNA, 25 bp, synthetic construct
  source 1..25: mol_type = other DNA
  modified_base 2: mod_base = OTHER; note = 2'-O-methyl modified nucleotide
  modified_base 4: mod_base = OTHER; note = 2'-O-methyl modified nucleotide
  modified_base 14: mod_base = OTHER; note = 2'-O-methyl modified nucleotide
  modified_base 16: mod_base = OTHER; note = 2'-O-methyl modified nucleotide
  misc_feature 1..24: note = RNA
  misc_feature 25: note = DNA
aagtgactaccacttatttataaat

SEQ ID NO: 847 - DNA, 25 bp, synthetic construct
  source 1..25: mol_type = other DNA
  modified_base 2: mod_base = OTHER; note = 2'-O-methyl modified nucleotide
  modified_base 4: mod_base = OTHER; note = 2'-O-methyl modified nucleotide
  modified_base 14: mod_base = OTHER; note = 2'-O-methyl modified nucleotide
  modified_base 16: mod_base = OTHER; note = 2'-O-methyl modified nucleotide
  misc_feature 1..23: note = RNA
  misc_feature 24: note = DNA
  misc_feature 25: note = RNA
agtgactaccacttatttcaaaatc

SEQ ID NO: 848 - RNA, 25 nt, synthetic construct
  source 1..25: mol_type = other RNA
  modified_base 2: mod_base = OTHER; note = 2'-O-methyl modified nucleotide
  modified_base 4: mod_base = OTHER; note = 2'-O-methyl modified nucleotide
  modified_base 14: mod_base = OTHER; note = 2'-O-methyl modified nucleotide
  modified_base 16: mod_base = OTHER; note = 2'-O-methyl modified nucleotide
gtgactaccacttatttctaaatcc

SEQ ID NO: 849 - DNA, 25 bp, synthetic construct
  source 1..25: mol_type = other DNA
  modified_base 2: mod_base = OTHER; note = 2'-O-methyl modified nucleotide
  modified_base 4: mod_base = OTHER; note = 2'-O-methyl modified nucleotide
  modified_base 14: mod_base = OTHER; note = 2'-O-methyl modified nucleotide
  modified_base 16: mod_base = OTHER; note = 2'-O-methyl modified nucleotide
  misc_feature 1..24: note = RNA
  misc_feature 25: note = DNA
tgactaccacttatttctaaatcct

SEQ ID NO: 850 - DNA, 25 bp, synthetic construct
  source 1..25: mol_type = other DNA
  modified_base 2: mod_base = OTHER; note = 2'-O-methyl modified nucleotide
  modified_base 4: mod_base = OTHER; note = 2'-O-methyl modified nucleotide
  modified_base 14: mod_base = OTHER; note = 2'-O-methyl modified nucleotide
  modified_base 16: mod_base = OTHER; note = 2'-O-methyl modified nucleotide
  misc_feature 1..23: note = RNA
  misc_feature 24: note = DNA
  misc_feature 25: note = RNA
gactaccacttatttctaaatcctc

SEQ ID NO: 851 - RNA, 25 nt, synthetic construct
  source 1..25: mol_type = other RNA
  modified_base 2: mod_base = OTHER; note = 2'-O-methyl modified nucleotide
  modified_base 4: mod_base = OTHER; note = 2'-O-methyl modified nucleotide
  modified_base 14: mod_base = OTHER; note = 2'-O-methyl modified nucleotide
  modified_base 16: mod_base = OTHER; note = 2'-O-methyl modified nucleotide
actaccacttatttctaaaacctca

SEQ ID NO: 852 - RNA, 25 nt, synthetic construct
  source 1..25: mol_type = other RNA
  modified_base 2: mod_base = OTHER; note = 2'-O-methyl modified nucleotide
  modified_base 4: mod_base = OTHER; note = 2'-O-methyl modified nucleotide
  modified_base 14: mod_base = OTHER; note = 2'-O-methyl modified nucleotide
  modified_base 16: mod_base = OTHER; note = 2'-O-methyl modified nucleotide
ctaccacttatttctaaatactcac

SEQ ID NO: 853 - DNA, 25 bp, synthetic construct
  source 1..25: mol_type = other DNA
  modified_base 2: mod_base = OTHER; note = 2'-O-methyl modified nucleotide
  modified_base 4: mod_base = OTHER; note = 2'-O-methyl modified nucleotide
  modified_base 14: mod_base = OTHER; note = 2'-O-methyl modified nucleotide
  modified_base 16: mod_base = OTHER; note = 2'-O-methyl modified nucleotide
  misc_feature 1..24: note = RNA
  misc_feature 25: note = DNA
taccacttatttctaaatcatcact

SEQ ID NO: 854 - RNA, 25 nt, synthetic construct
  source 1..25: mol_type = other RNA
  modified_base 2: mod_base = OTHER; note = 2'-O-methyl modified nucleotide
  modified_base 4: mod_base = OTHER; note = 2'-O-methyl modified nucleotide
  modified_base 14: mod_base = OTHER; note = 2'-O-methyl modified nucleotide
  modified_base 16: mod_base = OTHER; note = 2'-O-methyl modified nucleotide
ttgtgaaatttgttaatatatataa

SEQ ID NO: 855 - DNA, 25 bp, synthetic construct
  source 1..25: mol_type = other DNA
  modified_base 2: mod_base = OTHER; note = 2'-O-methyl modified nucleotide
  modified_base 4: mod_base = OTHER; note = 2'-O-methyl modified nucleotide
  modified_base 14: mod_base = OTHER; note = 2'-O-methyl modified nucleotide
  modified_base 16: mod_base = OTHER; note = 2'-O-methyl modified nucleotide
  misc_feature 1..24: note = RNA
  misc_feature 25: note = DNA
tgtgaaatttgttaatataaataat

SEQ ID NO: 856 - DNA, 25 bp, synthetic construct
  source 1..25: mol_type = other DNA
  modified_base 2: mod_base = OTHER; note = 2'-O-methyl modified nucleotide
  modified_base 4: mod_base = OTHER; note = 2'-O-methyl modified nucleotide
  modified_base 14: mod_base = OTHER; note = 2'-O-methyl modified nucleotide
  modified_base 16: mod_base = OTHER; note = 2'-O-methyl modified nucleotide
  misc_feature 1..23: note = RNA
  misc_feature 24: note = DNA
  misc_feature 25: note = RNA
gtgaaatttgttaatatatataata

SEQ ID NO: 857 - RNA, 25 nt, synthetic construct
  source 1..25: mol_type = other RNA
  modified_base 2: mod_base = OTHER; note = 2'-O-methyl modified nucleotide
  modified_base 4: mod_base = OTHER; note = 2'-O-methyl modified nucleotide
  modified_base 14: mod_base = OTHER; note = 2'-O-methyl modified nucleotide
  modified_base 16: mod_base = OTHER; note = 2'-O-methyl modified nucleotide
tgaaatttgttaatatataaaatac

SEQ ID NO: 858 - DNA, 25 bp, synthetic construct
  source 1..25: mol_type = other DNA
  modified_base 2: mod_base = OTHER; note = 2'-O-methyl modified nucleotide
  modified_base 4: mod_base = OTHER; note = 2'-O-methyl modified nucleotide
  modified_base 14: mod_base = OTHER; note = 2'-O-methyl modified nucleotide
  modified_base 16: mod_base = OTHER; note = 2'-O-methyl modified nucleotide
  misc_feature 1..24: note = RNA
  misc_feature 25: note = DNA
gaaatttgttaatatatataatact

SEQ ID NO: 859 - RNA, 25 nt, synthetic construct
  source 1..25: mol_type = other RNA
  modified_base 2: mod_base = OTHER; note = 2'-O-methyl modified nucleotide
  modified_base 4: mod_base = OTHER; note = 2'-O-methyl modified nucleotide
  modified_base 14: mod_base = OTHER; note = 2'-O-methyl modified nucleotide
  modified_base 16: mod_base = OTHER; note = 2'-O-methyl modified nucleotide
acttgtgtttgtatataaaaggtga

SEQ ID NO: 860 - RNA, 25 nt, synthetic construct
  source 1..25: mol_type = other RNA
  modified_base 2: mod_base = OTHER; note = 2'-O-methyl modified nucleotide
  modified_base 4: mod_base = OTHER; note = 2'-O-methyl modified nucleotide
  modified_base 14: mod_base = OTHER; note = 2'-O-methyl modified nucleotide
  modified_base 16: mod_base = OTHER; note = 2'-O-methyl modified nucleotide
cttgtgtttgtatataaatagtgag

SEQ ID NO: 861 - RNA, 25 nt, synthetic construct
  source 1..25: mol_type = other RNA
  modified_base 2: mod_base = OTHER; note = 2'-O-methyl modified nucleotide
  modified_base 4: mod_base = OTHER; note = 2'-O-methyl modified nucleotide
  modified_base 14: mod_base = OTHER; note = 2'-O-methyl modified nucleotide
  modified_base 16: mod_base = OTHER; note = 2'-O-methyl modified nucleotide
ttgtgtttgtatataaatgatgaga

SEQ ID NO: 862 - RNA, 25 nt, synthetic construct
  source 1..25: mol_type = other RNA
  modified_base 2: mod_base = OTHER; note = 2'-O-methyl modified nucleotide
  modified_base 4: mod_base = OTHER; note = 2'-O-methyl modified nucleotide
  modified_base 14: mod_base = OTHER; note = 2'-O-methyl modified nucleotide
  modified_base 16: mod_base = OTHER; note = 2'-O-methyl modified nucleotide
tgtgtttgtatataaatggagagaa

SEQ ID NO: 863 - DNA, 25 bp, synthetic construct
  source 1..25: mol_type = other DNA
  modified_base 2: mod_base = OTHER; note = 2'-O-methyl modified nucleotide
  modified_base 4: mod_base = OTHER; note = 2'-O-methyl modified nucleotide
  modified_base 14: mod_base = OTHER; note = 2'-O-methyl modified nucleotide
  modified_base 16: mod_base = OTHER; note = 2'-O-methyl modified nucleotide
  misc_feature 1..24: note = RNA
  misc_feature 25: note = DNA
gtgtttgtatataaatggtaagaat

SEQ ID NO: 864 - DNA, 25 bp, synthetic construct
  source 1..25: mol_type = other DNA
  modified_base 2: mod_base = OTHER; note = 2'-O-methyl modified nucleotide
  modified_base 4: mod_base = OTHER; note = 2'-O-methyl modified nucleotide
  modified_base 14: mod_base = OTHER; note = 2'-O-methyl modified nucleotide
  modified_base 16: mod_base = OTHER; note = 2'-O-methyl modified nucleotide
  misc_feature 1..23: note = RNA
  misc_feature 24..25: note = DNA
tgtttgtatataaatggtgagaatt

SEQ ID NO: 865 - RNA, 25 nt, synthetic construct
  source 1..25: mol_type = other RNA
  modified_base 2: mod_base = OTHER; note = 2'-O-methyl modified nucleotide
  modified_base 4: mod_base = OTHER; note = 2'-O-methyl modified nucleotide
  modified_base 14: mod_base = OTHER; note = 2'-O-methyl modified nucleotide
  modified_base 16: mod_base = OTHER; note = 2'-O-methyl modified nucleotide
tgtggtgtaaaggaattcaatagcc

SEQ ID NO: 866 - RNA, 25 nt, synthetic construct
  source 1..25: mol_type = other RNA
  modified_base 2: mod_base = OTHER; note = 2'-O-methyl modified nucleotide
  modified_base 4: mod_base = OTHER; note = 2'-O-methyl modified nucleotide
  modified_base 14: mod_base = OTHER; note = 2'-O-methyl modified nucleotide
  modified_base 16: mod_base = OTHER; note = 2'-O-methyl modified nucleotide
gtggtgtaaaggaattcataagcca

SEQ ID NO: 867 - DNA, 25 bp, synthetic construct
  source 1..25: mol_type = other DNA
  modified_base 2: mod_base = OTHER; note = 2'-O-methyl modified nucleotide
  modified_base 4: mod_base = OTHER; note = 2'-O-methyl modified nucleotide
  modified_base 14: mod_base = OTHER; note = 2'-O-methyl modified nucleotide
  modified_base 16: mod_base = OTHER; note = 2'-O-methyl modified nucleotide
  misc_feature 1..24: note = RNA
  misc_feature 25: note = DNA
tggtgtaaaggaattcattagccat

SEQ ID NO: 868 - DNA, 25 bp, synthetic construct
  source 1..25: mol_type = other DNA
  modified_base 2: mod_base = OTHER; note = 2'-O-methyl modified nucleotide
  modified_base 4: mod_base = OTHER; note = 2'-O-methyl modified nucleotide
  modified_base 14: mod_base = OTHER; note = 2'-O-methyl modified nucleotide
  modified_base 16: mod_base = OTHER; note = 2'-O-methyl modified nucleotide
  misc_feature 1..23: note = RNA
  misc_feature 24: note = DNA
  misc_feature 25: note = RNA
ggtgtaaaggaattcattaaccatg

SEQ ID NO: 869 - RNA, 25 nt, synthetic construct
  source 1..25: mol_type = other RNA
  modified_base 2: mod_base = OTHER; note = 2'-O-methyl modified nucleotide
  modified_base 4: mod_base = OTHER; note = 2'-O-methyl modified nucleotide
  modified_base 14: mod_base = OTHER; note = 2'-O-methyl modified nucleotide
  modified_base 16: mod_base = OTHER; note = 2'-O-methyl modified nucleotide
gtgtaaaggaattcattagacatgg

SEQ ID NO: 870 - RNA, 25 nt, synthetic construct
  source 1..25: mol_type = other RNA
  modified_base 2: mod_base = OTHER; note = 2'-O-methyl modified nucleotide
  modified_base 4: mod_base = OTHER; note = 2'-O-methyl modified nucleotide
  modified_base 14: mod_base = OTHER; note = 2'-O-methyl modified nucleotide
  modified_base 16: mod_base = OTHER; note = 2'-O-methyl modified nucleotide
tgtaaaggaattcattagcaatgga

SEQ ID NO: 871 - DNA, 25 bp, synthetic construct
  source 1..25: mol_type = other DNA
  modified_base 2: mod_base = OTHER; note = 2'-O-methyl modified nucleotide
  modified_base 4: mod_base = OTHER; note = 2'-O-methyl modified nucleotide
  modified_base 14: mod_base = OTHER; note = 2'-O-methyl modified nucleotide
  modified_base 16: mod_base = OTHER; note = 2'-O-methyl modified nucleotide
  misc_feature 1..24: note = RNA
  misc_feature 25: note = DNA
gtaaaggaattcattagccatggat

SEQ ID NO: 872 - DNA, 25 bp, synthetic construct
  source 1..25: mol_type = other DNA
  modified_base 2: mod_base = OTHER; note = 2'-O-methyl modified nucleotide
  modified_base 4: mod_base = OTHER; note = 2'-O-methyl modified nucleotide
  modified_base 14: mod_base = OTHER; note = 2'-O-methyl modified nucleotide
  modified_base 16: mod_base = OTHER; note = 2'-O-methyl modified nucleotide
  misc_feature 1..23: note = RNA
  misc_feature 24: note = DNA
  misc_feature 25: note = RNA
taaaggaattcattagccaaggatg

SEQ ID NO: 873 - DNA, 25 bp, synthetic construct
  source 1..25: mol_type = other DNA
  modified_base 2: mod_base = OTHER; note = 2'-O-methyl modified nucleotide
  modified_base 4: mod_base = OTHER; note = 2'-O-methyl modified nucleotide
  modified_base 14: mod_base = OTHER; note = 2'-O-methyl modified nucleotide
  modified_base 16: mod_base = OTHER; note = 2'-O-methyl modified nucleotide
  misc_feature 1..24: note = RNA
  misc_feature 25: note = DNA
aaaggaattcattagccatagatgt

SEQ ID NO: 874 - DNA, 25 bp, synthetic construct
  source 1..25: mol_type = other DNA
  modified_base 2: mod_base = OTHER; note = 2'-O-methyl modified nucleotide
  modified_base 4: mod_base = OTHER; note = 2'-O-methyl modified nucleotide
  modified_base 14: mod_base = OTHER; note = 2'-O-methyl modified nucleotide
  modified_base 16: mod_base = OTHER; note = 2'-O-methyl modified nucleotide
  misc_feature 1..23: note = RNA
  misc_feature 24: note = DNA
  misc_feature 25: note = RNA
aaggaattcattagccatgaatgta

SEQ ID NO: 875 - DNA, 25 bp, synthetic construct
  source 1..25: mol_type = other DNA
  modified_base 2: mod_base = OTHER; note = 2'-O-methyl modified nucleotide
  modified_base 4: mod_base = OTHER; note = 2'-O-methyl modified nucleotide
  modified_base 14: mod_base = OTHER; note = 2'-O-methyl modified nucleotide
  modified_base 16: mod_base = OTHER; note = 2'-O-methyl modified nucleotide
  misc_feature 1..24: note = RNA
  misc_feature 25: note = DNA
aggaattcattagccatggatgtat

SEQ ID NO: 876 - DNA, 25 bp, synthetic construct
  source 1..25: mol_type = other DNA
  modified_base 2: mod_base = OTHER; note = 2'-O-methyl modified nucleotide
  modified_base 4: mod_base = OTHER; note = 2'-O-methyl modified nucleotide
  modified_base 14: mod_base = OTHER; note = 2'-O-methyl modified nucleotide
  modified_base 16: mod_base = OTHER; note = 2'-O-methyl modified nucleotide
  misc_feature 1..23: note = RNA
  misc_feature 24..25: note = DNA
ggaattcattagccatggaagtatt

SEQ ID NO: 877 - DNA, 25 bp, synthetic construct
  source 1..25: mol_type = other DNA
  modified_base 2: mod_base = OTHER; note = 2'-O-methyl modified nucleotide
  modified_base 4: mod_base = OTHER; note = 2'-O-methyl modified nucleotide
  modified_base 14: mod_base = OTHER; note = 2'-O-methyl modified nucleotide
  modified_base 16: mod_base = OTHER; note = 2'-O-methyl modified nucleotide
  misc_feature 1..23: note = RNA
  misc_feature 24: note = DNA
  misc_feature 25: note = RNA
gaattcattagccatggatatattc

SEQ ID NO: 878 - RNA, 25 nt, synthetic construct
  source 1..25: mol_type = other RNA
  modified_base 2: mod_base = OTHER; note = 2'-O-methyl modified nucleotide
  modified_base 4: mod_base = OTHER; note = 2'-O-methyl modified nucleotide
  modified_base 14: mod_base = OTHER; note = 2'-O-methyl modified nucleotide
  modified_base 16: mod_base = OTHER; note = 2'-O-methyl modified nucleotide
aattcattagccatggatgaattca

SEQ ID NO: 879 - DNA, 25 bp, synthetic construct
  source 1..25: mol_type = other DNA
  modified_base 2: mod_base = OTHER; note = 2'-O-methyl modified nucleotide
  modified_base 4: mod_base = OTHER; note = 2'-O-methyl modified nucleotide
  modified_base 14: mod_base = OTHER; note = 2'-O-methyl modified nucleotide
  modified_base 16: mod_base = OTHER; note = 2'-O-methyl modified nucleotide
  misc_feature 1..24: note = RNA
  misc_feature 25: note = DNA
attcattagccatggatgtattcat

SEQ ID NO: 880 - DNA, 25 bp, synthetic construct
  source 1..25: mol_type = other DNA
  modified_base 2: mod_base = OTHER; note = 2'-O-methyl modified nucleotide
  modified_base 4: mod_base = OTHER; note = 2'-O-methyl modified nucleotide
  modified_base 14: mod_base = OTHER; note = 2'-O-methyl modified nucleotide
  modified_base 16: mod_base = OTHER; note = 2'-O-methyl modified nucleotide
  misc_feature 1..23: note = RNA
  misc_feature 24: note = DNA
  misc_feature 25: note = RNA
ttcattagccatggatgtaatcatg

SEQ ID NO: 881 - RNA, 25 nt, synthetic construct
  source 1..25: mol_type = other RNA
  modified_base 2: mod_base = OTHER; note = 2'-O-methyl modified nucleotide
  modified_base 4: mod_base = OTHER; note = 2'-O-methyl modified nucleotide
  modified_base 14: mod_base = OTHER; note = 2'-O-methyl modified nucleotide
  modified_base 16: mod_base = OTHER; note = 2'-O-methyl modified nucleotide
tcattagccatggatgtatacatga

SEQ ID NO: 882 - RNA, 25 nt, synthetic construct
  source 1..25: mol_type = other RNA
  modified_base 2: mod_base = OTHER; note = 2'-O-methyl modified nucleotide
  modified_base 4: mod_base = OTHER; note = 2'-O-methyl modified nucleotide
  modified_base 14: mod_base = OTHER; note = 2'-O-methyl modified nucleotide
  modified_base 16: mod_base = OTHER; note = 2'-O-methyl modified nucleotide
cattagccatggatgtattaatgaa

SEQ ID NO: 883 - RNA, 25 nt, synthetic construct
  source 1..25: mol_type = other RNA
  modified_base 2: mod_base = OTHER; note = 2'-O-methyl modified nucleotide
  modified_base 4: mod_base = OTHER; note = 2'-O-methyl modified nucleotide
  modified_base 14: mod_base = OTHER; note = 2'-O-methyl modified nucleotide
  modified_base 16: mod_base = OTHER; note = 2'-O-methyl modified nucleotide
attagccatggatgtattcatgaaa

SEQ ID NO: 884 - RNA, 25 nt, synthetic construct
  source 1..25: mol_type = other RNA
  modified_base 2: mod_base = OTHER; note = 2'-O-methyl modified nucleotide
  modified_base 4: mod_base = OTHER; note = 2'-O-methyl modified nucleotide
  modified_base 14: mod_base = OTHER; note = 2'-O-methyl modified nucleotide
  modified_base 16: mod_base = OTHER; note = 2'-O-methyl modified nucleotide
ttagccatggatgtattcaagaaag

SEQ ID NO: 885 - RNA, 25 nt, synthetic construct
  source 1..25: mol_type = other RNA
  modified_base 2: mod_base = OTHER; note = 2'-O-methyl modified nucleotide
  modified_base 4: mod_base = OTHER; note = 2'-O-methyl modified nucleotide
  modified_base 14: mod_base = OTHER; note = 2'-O-methyl modified nucleotide
  modified_base 16: mod_base = OTHER; note = 2'-O-methyl modified nucleotide
tagccatggatgtattcataaaagg

SEQ ID NO: 886 - RNA, 25 nt, synthetic construct
  source 1..25: mol_type = other RNA
  modified_base 2: mod_base = OTHER; note = 2'-O-methyl modified nucleotide
  modified_base 4: mod_base = OTHER; note = 2'-O-methyl modified nucleotide
  modified_base 14: mod_base = OTHER; note = 2'-O-methyl modified nucleotide
  modified_base 16: mod_base = OTHER; note = 2'-O-methyl modified nucleotide
agccatggatgtattcatgaaagga

SEQ ID NO: 887 - RNA, 25 nt, synthetic construct
  source 1..25: mol_type = other RNA
  modified_base 2: mod_base = OTHER; note = 2'-O-methyl modified nucleotide
  modified_base 4: mod_base = OTHER; note = 2'-O-methyl modified nucleotide
  modified_base 14: mod_base = OTHER; note = 2'-O-methyl modified nucleotide
  modified_base 16: mod_base = OTHER; note = 2'-O-methyl modified nucleotide
gccatggatgtattcatgaaaggac

SEQ ID NO: 888 - DNA, 25 bp, synthetic construct
  source 1..25: mol_type = other DNA
  modified_base 2: mod_base = OTHER; note = 2'-O-methyl modified nucleotide
  modified_base 4: mod_base = OTHER; note = 2'-O-methyl modified nucleotide
  modified_base 14: mod_base = OTHER; note = 2'-O-methyl modified nucleotide
  modified_base 16: mod_base = OTHER; note = 2'-O-methyl modified nucleotide
  misc_feature 1..24: note = RNA
  misc_feature 25: note = DNA
ccatggatgtattcatgaaaggact

SEQ ID NO: 889 - DNA, 25 bp, synthetic construct
  source 1..25: mol_type = other DNA
  modified_base 2: mod_base = OTHER; note = 2'-O-methyl modified nucleotide
  modified_base 4: mod_base = OTHER; note = 2'-O-methyl modified nucleotide
  modified_base 14: mod_base = OTHER; note = 2'-O-methyl modified nucleotide
  modified_base 16: mod_base = OTHER; note = 2'-O-methyl modified nucleotide
  misc_feature 1..23: note = RNA
  misc_feature 24..25: note = DNA
catggatgtattcatgaaaagactt

SEQ ID NO: 890 - DNA, 25 bp, synthetic construct
  source 1..25: mol_type = other DNA
  modified_base 2: mod_base = OTHER; note = 2'-O-methyl modified nucleotide
  modified_base 4: mod_base = OTHER; note = 2'-O-methyl modified nucleotide
  modified_base 14: mod_base = OTHER; note = 2'-O-methyl modified nucleotide
  modified_base 16: mod_base = OTHER; note = 2'-O-methyl modified nucleotide
  misc_feature 1..23: note = RNA
  misc_feature 24..25: note = DNA
atggatgtattcatgaaagaacttt

SEQ ID NO: 891 - DNA, 25 bp, synthetic construct
  source 1..25: mol_type = other DNA
  modified_base 2: mod_base = OTHER; note = 2'-O-methyl modified nucleotide
  modified_base 4: mod_base = OTHER; note = 2'-O-methyl modified nucleotide
  modified_base 14: mod_base = OTHER; note = 2'-O-methyl modified nucleotide
  modified_base 16: mod_base = OTHER; note = 2'-O-methyl modified nucleotide
  misc_feature 1..23: note = RNA
  misc_feature 24: note = DNA
  misc_feature 25: note = RNA
tggatgtattcatgaaaggactttc

SEQ ID NO: 892 - RNA, 25 nt, synthetic construct
  source 1..25: mol_type = other RNA
  modified_base 2: mod_base = OTHER; note = 2'-O-methyl modified nucleotide
  modified_base 4: mod_base = OTHER; note = 2'-O-methyl modified nucleotide
  modified_base 14: mod_base = OTHER; note = 2'-O-methyl modified nucleotide
  modified_base 16: mod_base = OTHER; note = 2'-O-methyl modified nucleotide
ggatgtattcatgaaaggaatttca

SEQ ID NO: 893 - RNA, 25 nt, synthetic construct
  source 1..25: mol_type = other RNA
  modified_base 2: mod_base = OTHER; note = 2'-O-methyl modified nucleotide
  modified_base 4: mod_base = OTHER; note = 2'-O-methyl modified nucleotide
  modified_base 14: mod_base = OTHER; note = 2'-O-methyl modified nucleotide
  modified_base 16: mod_base = OTHER; note = 2'-O-methyl modified nucleotide
gatgtattcatgaaaggacattcaa

SEQ ID NO: 894 - RNA, 25 nt, synthetic construct
  source 1..25: mol_type = other RNA
  modified_base 2: mod_base = OTHER; note = 2'-O-methyl modified nucleotide
  modified_base 4: mod_base = OTHER; note = 2'-O-methyl modified nucleotide
  modified_base 14: mod_base = OTHER; note = 2'-O-methyl modified nucleotide
  modified_base 16: mod_base = OTHER; note = 2'-O-methyl modified nucleotide
atgtattcatgaaaggactatcaaa

SEQ ID NO: 895 - RNA, 25 nt, synthetic construct
  source 1..25: mol_type = other RNA
  modified_base 2: mod_base = OTHER; note = 2'-O-methyl modified nucleotide
  modified_base 4: mod_base = OTHER; note = 2'-O-methyl modified nucleotide
  modified_base 14: mod_base = OTHER; note = 2'-O-methyl modified nucleotide
  modified_base 16: mod_base = OTHER; note = 2'-O-methyl modified nucleotide
gtattcatgaaaggactttaaaagg

SEQ ID NO: 896 - RNA, 25 nt, synthetic construct
  source 1..25: mol_type = other RNA
  modified_base 2: mod_base = OTHER; note = 2'-O-methyl modified nucleotide
  modified_base 4: mod_base = OTHER; note = 2'-O-methyl modified nucleotide
  modified_base 14: mod_base = OTHER; note = 2'-O-methyl modified nucleotide
  modified_base 16: mod_base = OTHER; note = 2'-O-methyl modified nucleotide
agaagcagcaggaaagacaaaagag

SEQ ID NO: 897 - DNA, 25 bp, synthetic construct
  source 1..25: mol_type = other DNA
  modified_base 2: mod_base = OTHER; note = 2'-O-methyl modified nucleotide
  modified_base 4: mod_base = OTHER; note = 2'-O-methyl modified nucleotide
  modified_base 14: mod_base = OTHER; note = 2'-O-methyl modified nucleotide
  modified_base 16: mod_base = OTHER; note = 2'-O-methyl modified nucleotide
  misc_feature 1..24: note = RNA
  misc_feature 25: note = DNA
cagcaggaaagacaaaagaaggtgt

SEQ ID NO: 898 - DNA, 25 bp, synthetic construct
  source 1..25: mol_type = other DNA
  modified_base 2: mod_base = OTHER; note = 2'-O-methyl modified nucleotide
  modified_base 4: mod_base = OTHER; note = 2'-O-methyl modified nucleotide
  modified_base 14: mod_base = OTHER; note = 2'-O-methyl modified nucleotide
  modified_base 16: mod_base = OTHER; note = 2'-O-methyl modified nucleotide
  misc_feature 1..23: note = RNA
  misc_feature 24: note = DNA
  misc_feature 25: note = RNA
gcaggaaagacaaaagaggatgttc

SEQ ID NO: 899 - DNA, 25 bp, synthetic construct
  source 1..25: mol_type = other DNA
  modified_base 2: mod_base = OTHER; note = 2'-O-methyl modified nucleotide
  modified_base 4: mod_base = OTHER; note = 2'-O-methyl modified nucleotide
  modified_base 14: mod_base = OTHER; note = 2'-O-methyl modified nucleotide
  modified_base 16: mod_base = OTHER; note = 2'-O-methyl modified nucleotide
  misc_feature 1..23: note = RNA
  misc_feature 24: note = DNA
  misc_feature 25: note = RNA
gaaagacaaaagagggtgtactcta

SEQ ID NO: 900 - DNA, 25 bp, synthetic construct
  source 1..25: mol_type = other DNA
  modified_base 2: mod_base = OTHER; note = 2'-O-methyl modified nucleotide
  modified_base 4: mod_base = OTHER; note = 2'-O-methyl modified nucleotide
  modified_base 14: mod_base = OTHER; note = 2'-O-methyl modified nucleotide
  modified_base 16: mod_base = OTHER; note = 2'-O-methyl modified nucleotide
  misc_feature 1..24: note = RNA
  misc_feature 25: note = DNA
aaagacaaaagagggtgttatctat

SEQ ID NO: 901 - DNA, 25 bp, synthetic construct
  source 1..25: mol_type = other DNA
  modified_base 2: mod_base = OTHER; note = 2'-O-methyl modified nucleotide
  modified_base 4: mod_base = OTHER; note = 2'-O-methyl modified nucleotide
  modified_base 14: mod_base = OTHER; note = 2'-O-methyl modified nucleotide
  modified_base 16: mod_base = OTHER; note = 2'-O-methyl modified nucleotide
  misc_feature 1..24: note = RNA
  misc_feature 25: note = DNA
agacaaaagagggtgttctatatgt

SEQ ID NO: 902 - DNA, 25 bp, synthetic construct
  source 1..25: mol_type = other DNA
  modified_base 2: mod_base = OTHER; note = 2'-O-methyl modified nucleotide
  modified_base 4: mod_base = OTHER; note = 2'-O-methyl modified nucleotide
  modified_base 14: mod_base = OTHER; note = 2'-O-methyl modified nucleotide
  modified_base 16: mod_base = OTHER; note = 2'-O-methyl modified nucleotide
  misc_feature 1..23: note = RNA
  misc_feature 24: note = DNA
  misc_feature 25: note = RNA
gacaaaagagggtgttctcaatgta

SEQ ID NO: 903 - RNA, 25 nt, synthetic construct
  source 1..25: mol_type = other RNA
  modified_base 2: mod_base = OTHER; note = 2'-O-methyl modified nucleotide
  modified_base 4: mod_base = OTHER; note = 2'-O-methyl modified nucleotide
  modified_base 14: mod_base = OTHER; note = 2'-O-methyl modified nucleotide
  modified_base 16: mod_base = OTHER; note = 2'-O-methyl modified nucleotide
agagggtgttctctatgtaagctcc

SEQ ID NO: 904 - RNA, 25 nt, synthetic construct
  source 1..25: mol_type = other RNA
  modified_base 2: mod_base = OTHER; note = 2'-O-methyl modified nucleotide
  modified_base 4: mod_base = OTHER; note = 2'-O-methyl modified nucleotide
  modified_base 14: mod_base = OTHER; note = 2'-O-methyl modified nucleotide
  modified_base 16: mod_base = OTHER; note = 2'-O-methyl modified nucleotide
agggtgttctctatgtaggatccaa

SEQ ID NO: 905 - RNA, 25 nt, synthetic construct
  source 1..25: mol_type = other RNA
  modified_base 2: mod_base = OTHER; note = 2'-O-methyl modified nucleotide
  modified_base 4: mod_base = OTHER; note = 2'-O-methyl modified nucleotide
  modified_base 14: mod_base = OTHER; note = 2'-O-methyl modified nucleotide
  modified_base 16: mod_base = OTHER; note = 2'-O-methyl modified nucleotide
ggtgttctctatgtaggctacaaaa

SEQ ID NO: 906 - RNA, 25 nt, synthetic construct
  source 1..25: mol_type = other RNA
  modified_base 2: mod_base = OTHER; note = 2'-O-methyl modified nucleotide
  modified_base 4: mod_base = OTHER; note = 2'-O-methyl modified nucleotide
  modified_base 14: mod_base = OTHER; note = 2'-O-methyl modified nucleotide
  modified_base 16: mod_base = OTHER; note = 2'-O-methyl modified nucleotide
aggaagggtatcaagactaagaacc

SEQ ID NO: 907 - RNA, 25 nt, synthetic construct
  source 1..25: mol_type = other RNA
  modified_base 2: mod_base = OTHER; note = 2'-O-methyl modified nucleotide
  modified_base 4: mod_base = OTHER; note = 2'-O-methyl modified nucleotide
  modified_base 14: mod_base = OTHER; note = 2'-O-methyl modified nucleotide
  modified_base 16: mod_base = OTHER; note = 2'-O-methyl modified nucleotide
aagggtatcaagactacgaacctga

SEQ ID NO: 908 - RNA, 25 nt, synthetic construct
  source 1..25: mol_type = other RNA
  modified_base 2: mod_base = OTHER; note = 2'-O-methyl modified nucleotide
  modified_base 4: mod_base = OTHER; note = 2'-O-methyl modified nucleotide
  modified_base 14: mod_base = OTHER; note = 2'-O-methyl modified nucleotide
  modified_base 16: mod_base = OTHER; note = 2'-O-methyl modified nucleotide
agggtatcaagactacgaaactgaa

SEQ ID NO: 909 - DNA, 25 bp, synthetic construct
  source 1..25: mol_type = other DNA
  modified_base 2: mod_base = OTHER; note = 2'-O-methyl modified nucleotide
  modified_base 4: mod_base = OTHER; note = 2'-O-methyl modified nucleotide
  modified_base 14: mod_base = OTHER; note = 2'-O-methyl modified nucleotide
  modified_base 16: mod_base = OTHER; note = 2'-O-methyl modified nucleotide
  misc_feature 1..23: note = RNA
  misc_feature 24: note = DNA
  misc_feature 25: note = RNA
atcaagactacgaacctgaagccta

SEQ ID NO: 910 - RNA, 25 nt, synthetic construct
  source 1..25: mol_type = other RNA
  modified_base 2: mod_base = OTHER; note = 2'-O-methyl modified nucleotide
  modified_base 4: mod_base = OTHER; note = 2'-O-methyl modified nucleotide
  modified_base 14: mod_base = OTHER; note = 2'-O-methyl modified nucleotide
  modified_base 16: mod_base = OTHER; note = 2'-O-methyl modified nucleotide
tcaagactacgaacctgaaacctaa

SEQ ID NO: 911 - RNA, 25 nt, synthetic construct
  source 1..25: mol_type = other RNA
  modified_base 2: mod_base = OTHER; note = 2'-O-methyl modified nucleotide
  modified_base 4: mod_base = OTHER; note = 2'-O-methyl modified nucleotide
  modified_base 14: mod_base = OTHER; note = 2'-O-methyl modified nucleotide
  modified_base 16: mod_base = OTHER; note = 2'-O-methyl modified nucleotide
aagactacgaacctgaagcataaga

SEQ ID NO: 912 - RNA, 25 nt, synthetic construct
  source 1..25: mol_type = other RNA
  modified_base 2: mod_base = OTHER; note = 2'-O-methyl modified nucleotide
  modified_base 4: mod_base = OTHER; note = 2'-O-methyl modified nucleotide
  modified_base 14: mod_base = OTHER; note = 2'-O-methyl modified nucleotide
  modified_base 16: mod_base = OTHER; note = 2'-O-methyl modified nucleotide
gactacgaacctgaagcctaagaaa

SEQ ID NO: 913 - DNA, 25 bp, synthetic construct
  source 1..25: mol_type = other DNA
  modified_base 2: mod_base = OTHER; note = 2'-O-methyl modified nucleotide
  modified_base 4: mod_base = OTHER; note = 2'-O-methyl modified nucleotide
  modified_base 14: mod_base = OTHER; note = 2'-O-methyl modified nucleotide
  modified_base 16: mod_base = OTHER; note = 2'-O-methyl modified nucleotide
  misc_feature 1..24: note = RNA
  misc_feature 25: note = DNA
actacgaacctgaagcctaagaaat

SEQ ID NO: 914 - DNA, 25 bp, synthetic construct
  source 1..25: mol_type = other DNA
  modified_base 2: mod_base = OTHER; note = 2'-O-methyl modified nucleotide
  modified_base 4: mod_base = OTHER; note = 2'-O-methyl modified nucleotide
  modified_base 14: mod_base = OTHER; note = 2'-O-methyl modified nucleotide
  modified_base 16: mod_base = OTHER; note = 2'-O-methyl modified nucleotide
  misc_feature 1..23: note = RNA
  misc_feature 24: note = DNA
  misc_feature 25: note = RNA
ctacgaacctgaagcctaaaaaata

SEQ ID NO: 915 - DNA, 25 bp, synthetic construct
  source 1..25: mol_type = other DNA
  modified_base 2: mod_base = OTHER; note = 2'-O-methyl modified nucleotide
  modified_base 4: mod_base = OTHER; note = 2'-O-methyl modified nucleotide
  modified_base 14: mod_base = OTHER; note = 2'-O-methyl modified nucleotide
  modified_base 16: mod_base = OTHER; note = 2'-O-methyl modified nucleotide
  misc_feature 1..23: note = RNA
  misc_feature 24: note = DNA
  misc_feature 25: note = RNA
acgaacctgaagcctaagaaatatc

SEQ ID NO: 916 - DNA, 25 bp, synthetic construct
  source 1..25: mol_type = other DNA
  modified_base 2: mod_base = OTHER; note = 2'-O-methyl modified nucleotide
  modified_base 4: mod_base = OTHER; note = 2'-O-methyl modified nucleotide
  modified_base 14: mod_base = OTHER; note = 2'-O-methyl modified nucleotide
  modified_base 16: mod_base = OTHER; note = 2'-O-methyl modified nucleotide
  misc_feature 1..24: note = RNA
  misc_feature 25: note = DNA
cgaacctgaagcctaagaaatatct

SEQ ID NO: 917 - DNA, 25 bp, synthetic construct
  source 1..25: mol_type = other DNA
  modified_base 2: mod_base = OTHER; note = 2'-O-methyl modified nucleotide
  modified_base 4: mod_base = OTHER; note = 2'-O-methyl modified nucleotide
  modified_base 14: mod_base = OTHER; note = 2'-O-methyl modified nucleotide
  modified_base 16: mod_base = OTHER; note = 2'-O-methyl modified nucleotide
  misc_feature 1..23: note = RNA
  misc_feature 24..25: note = DNA
aacctgaagcctaagaaatatcttt

SEQ ID NO: 918 - DNA, 25 bp, synthetic construct
  source 1..25: mol_type = other DNA
  modified_base 2: mod_base = OTHER; note = 2'-O-methyl modified nucleotide
  modified_base 4: mod_base = OTHER; note = 2'-O-methyl modified nucleotide
  modified_base 14: mod_base = OTHER; note = 2'-O-methyl modified nucleotide
  modified_base 16: mod_base = OTHER; note = 2'-O-methyl modified nucleotide
  misc_feature 1..23: note = RNA
  misc_feature 24: note = DNA
  misc_feature 25: note = RNA
acctgaagcctaagaaataactttg

SEQ ID NO: 919 - RNA, 25 nt, synthetic construct
  source 1..25: mol_type = other RNA
  modified_base 2: mod_base = OTHER; note = 2'-O-methyl modified nucleotide
  modified_base 4: mod_base = OTHER; note = 2'-O-methyl modified nucleotide
  modified_base 14: mod_base = OTHER; note = 2'-O-methyl modified nucleotide
  modified_base 16: mod_base = OTHER; note = 2'-O-methyl modified nucleotide
cctgaagcctaagaaatatatttgc

SEQ ID NO: 920 - DNA, 25 bp, synthetic construct
  source 1..25: mol_type = other DNA
  modified_base 2: mod_base = OTHER; note = 2'-O-methyl modified nucleotide
  modified_base 4: mod_base = OTHER; note = 2'-O-methyl modified nucleotide
  modified_base 14: mod_base = OTHER; note = 2'-O-methyl modified nucleotide
  modified_base 16: mod_base = OTHER; note = 2'-O-methyl modified nucleotide
  misc_feature 1..24: note = RNA
  misc_feature 25: note = DNA
ctgaagcctaagaaatatcattgct

SEQ ID NO: 921 - DNA, 25 bp, synthetic construct
  source 1..25: mol_type = other DNA
  modified_base 2: mod_base = OTHER; note = 2'-O-methyl modified nucleotide
  modified_base 4: mod_base = OTHER; note = 2'-O-methyl modified nucleotide
  modified_base 14: mod_base = OTHER; note = 2'-O-methyl modified nucleotide
  modified_base 16: mod_base = OTHER; note = 2'-O-methyl modified nucleotide
  misc_feature 1..23: note = RNA
  misc_feature 24: note = DNA
  misc_feature 25: note = RNA
tgaagcctaagaaatatctatgctc

SEQ ID NO: 922 - DNA, 25 bp, synthetic construct
  source 1..25: mol_type = other DNA
  modified_base 2: mod_base = OTHER; note = 2'-O-methyl modified nucleotide
  modified_base 4: mod_base = OTHER; note = 2'-O-methyl modified nucleotide
  modified_base 14: mod_base = OTHER; note = 2'-O-methyl modified nucleotide
  modified_base 16: mod_base = OTHER; note = 2'-O-methyl modified nucleotide
  misc_feature 1..24: note = RNA
  misc_feature 25: note = DNA
cctaagaaatatctttgctaccagt

SEQ ID NO: 923 - DNA, 25 bp, synthetic construct
  source 1..25: mol_type = other DNA
  modified_base 2: mod_base = OTHER; note = 2'-O-methyl modified nucleotide
  modified_base 4: mod_base = OTHER; note = 2'-O-methyl modified nucleotide
  modified_base 14: mod_base = OTHER; note = 2'-O-methyl modified nucleotide
  modified_base 16: mod_base = OTHER; note = 2'-O-methyl modified nucleotide
  misc_feature 1..23: note = RNA
  misc_feature 24..25: note = DNA
ctaagaaatatctttgctcacagtt

SEQ ID NO: 924 - DNA, 25 bp, synthetic construct
  source 1..25: mol_type = other DNA
  modified_base 2: mod_base = OTHER; note = 2'-O-methyl modified nucleotide
  modified_base 4: mod_base = OTHER; note = 2'-O-methyl modified nucleotide
  modified_base 14: mod_base = OTHER; note = 2'-O-methyl modified nucleotide
  modified_base 16: mod_base = OTHER; note = 2'-O-methyl modified nucleotide
  misc_feature 1..24: note = RNA
  misc_feature 25: note = DNA
agaaatatctttgctcccaatttct

SEQ ID NO: 925 - RNA, 25 nt, synthetic construct
  source 1..25: mol_type = other RNA
  modified_base 2: mod_base = OTHER; note = 2'-O-methyl modified nucleotide
  modified_base 4: mod_base = OTHER; note = 2'-O-methyl modified nucleotide
  modified_base 14: mod_base = OTHER; note = 2'-O-methyl modified nucleotide
  modified_base 16: mod_base = OTHER; note = 2'-O-methyl modified nucleotide
aatatctttgctcccagttacttga

SEQ ID NO: 926 - RNA, 25 nt, synthetic construct
  source 1..25: mol_type = other RNA
  modified_base 2: mod_base = OTHER; note = 2'-O-methyl modified nucleotide
  modified_base 4: mod_base = OTHER; note = 2'-O-methyl modified nucleotide
  modified_base 14: mod_base = OTHER; note = 2'-O-methyl modified nucleotide
  modified_base 16: mod_base = OTHER; note = 2'-O-methyl modified nucleotide
atatctttgctcccagtttattgag

SEQ ID NO: 927 - RNA, 25 nt, synthetic construct
  source 1..25: mol_type = other RNA
  modified_base 2: mod_base = OTHER; note = 2'-O-methyl modified nucleotide
  modified_base 4: mod_base = OTHER; note = 2'-O-methyl modified nucleotide
  modified_base 14: mod_base = OTHER; note = 2'-O-methyl modified nucleotide
  modified_base 16: mod_base = OTHER; note = 2'-O-methyl modified nucleotide
cagtttcttgagatctgctaacaga

SEQ ID NO: 928 - DNA, 25 bp, synthetic construct
  source 1..25: mol_type = other DNA
  modified_base 2: mod_base = OTHER; note = 2'-O-methyl modified nucleotide
  modified_base 4: mod_base = OTHER; note = 2'-O-methyl modified nucleotide
  modified_base 14: mod_base = OTHER; note = 2'-O-methyl modified nucleotide
  modified_base 16: mod_base = OTHER; note = 2'-O-methyl modified nucleotide
  misc_feature 1..23: note = RNA
  misc_feature 24: note = DNA
  misc_feature 25: note = RNA
tgtacaagtgctcagttccaatgtg

SEQ ID NO: 929 - RNA, 25 nt, synthetic construct
  source 1..25: mol_type = other RNA
  modified_base 2: mod_base = OTHER; note = 2'-O-methyl modified nucleotide
  modified_base 4: mod_base = OTHER; note = 2'-O-methyl modified nucleotide
  modified_base 14: mod_base = OTHER; note = 2'-O-methyl modified nucleotide
  modified_base 16: mod_base = OTHER; note = 2'-O-methyl modified nucleotide
atgtgcccagtcatgacatatctca

SEQ ID NO: 930 - RNA, 25 nt, synthetic construct
  source 1..25: mol_type = other RNA
  modified_base 2: mod_base = OTHER; note = 2'-O-methyl modified nucleotide
  modified_base 4: mod_base = OTHER; note = 2'-O-methyl modified nucleotide
  modified_base 14: mod_base = OTHER; note = 2'-O-methyl modified nucleotide
  modified_base 16: mod_base = OTHER; note = 2'-O-methyl modified nucleotide
tgtgcccagtcatgacattactcaa

SEQ ID NO: 931 - RNA, 25 nt, synthetic construct
  source 1..25: mol_type = other RNA
  modified_base 2: mod_base = OTHER; note = 2'-O-methyl modified nucleotide
  modified_base 4: mod_base = OTHER; note = 2'-O-methyl modified nucleotide
  modified_base 14: mod_base = OTHER; note = 2'-O-methyl modified nucleotide
  modified_base 16: mod_base = OTHER; note = 2'-O-methyl modified nucleotide
gtgcccagtcatgacatttatcaaa

SEQ ID NO: 932 - DNA, 25 bp, synthetic construct
  source 1..25: mol_type = other DNA
  modified_base 2: mod_base = OTHER; note = 2'-O-methyl modified nucleotide
  modified_base 4: mod_base = OTHER; note = 2'-O-methyl modified nucleotide
  modified_base 14: mod_base = OTHER; note = 2'-O-methyl modified nucleotide
  modified_base 16: mod_base = OTHER; note = 2'-O-methyl modified nucleotide
  misc_feature 1..23: note = RNA
  misc_feature 24..25: note = DNA
cagtcatgacatttctcaaagtttt

SEQ ID NO: 933 - DNA, 25 bp, synthetic construct
  source 1..25: mol_type = other DNA
  modified_base 2: mod_base = OTHER; note = 2'-O-methyl modified nucleotide
  modified_base 4: mod_base = OTHER; note = 2'-O-methyl modified nucleotide
  modified_base 14: mod_base = OTHER; note = 2'-O-methyl modified nucleotide
  modified_base 16: mod_base = OTHER; note = 2'-O-methyl modified nucleotide
  misc_feature 1..23: note = RNA
  misc_feature 24..25: note = DNA
agtcatgacatttctcaaaattttt

SEQ ID NO: 934 - DNA, 25 bp, synthetic construct
  source 1..25: mol_type = other DNA
  modified_base 2: mod_base = OTHER; note = 2'-O-methyl modified nucleotide
  modified_base 4: mod_base = OTHER; note = 2'-O-methyl modified nucleotide
  modified_base 14: mod_base = OTHER; note = 2'-O-methyl modified nucleotide
  modified_base 16: mod_base = OTHER; note = 2'-O-methyl modified nucleotide
  misc_feature 1..23: note = RNA
  misc_feature 24: note = DNA
  misc_feature 25: note = RNA
gtcatgacatttctcaaagatttta

SEQ ID NO: 935 - RNA, 25 nt, synthetic construct
  source 1..25: mol_type = other RNA
  modified_base 2: mod_base = OTHER; note = 2'-O-methyl modified nucleotide
  modified_base 4: mod_base = OTHER; note = 2'-O-methyl modified nucleotide
  modified_base 14: mod_base = OTHER; note = 2'-O-methyl modified nucleotide
  modified_base 16: mod_base = OTHER; note = 2'-O-methyl modified nucleotide
tcatgacatttctcaaagtatttac

SEQ ID NO: 936 - RNA, 25 nt, synthetic construct
  source 1..25: mol_type = other RNA
  modified_base 2: mod_base = OTHER; note = 2'-O-methyl modified nucleotide
  modified_base 4: mod_base = OTHER; note = 2'-O-methyl modified nucleotide
  modified_base 14: mod_base = OTHER; note = 2'-O-methyl modified nucleotide
  modified_base 16: mod_base = OTHER; note = 2'-O-methyl modified nucleotide
catgacatttctcaaagttattaca

SEQ ID NO: 937 - RNA, 25 nt, synthetic construct
  source 1..25: mol_type = other RNA
  modified_base 2: mod_base = OTHER; note = 2'-O-methyl modified nucleotide
  modified_base 4: mod_base = OTHER; note = 2'-O-methyl modified nucleotide
  modified_base 14: mod_base = OTHER; note = 2'-O-methyl modified nucleotide
  modified_base 16: mod_base = OTHER; note = 2'-O-methyl modified nucleotide
atgacatttctcaaagtttatacag

SEQ ID NO: 938 - DNA, 25 bp, synthetic construct
  source 1..25: mol_type = other DNA
  modified_base 2: mod_base = OTHER; note = 2'-O-methyl modified nucleotide
  modified_base 4: mod_base = OTHER; note = 2'-O-methyl modified nucleotide
  modified_base 14: mod_base = OTHER; note = 2'-O-methyl modified nucleotide
  modified_base 16: mod_base = OTHER; note = 2'-O-methyl modified nucleotide
  misc_feature 1..24: note = RNA
  misc_feature 25: note = DNA
tgacatttctcaaagttttaacagt

SEQ ID NO: 939 - DNA, 25 bp, synthetic construct
  source 1..25: mol_type = other DNA
  modified_base 2: mod_base = OTHER; note = 2'-O-methyl modified nucleotide
  modified_base 4: mod_base = OTHER; note = 2'-O-methyl modified nucleotide
  modified_base 14: mod_base = OTHER; note = 2'-O-methyl modified nucleotide
  modified_base 16: mod_base = OTHER; note = 2'-O-methyl modified nucleotide
  misc_feature 1..23: note = RNA
  misc_feature 24: note = DNA
  misc_feature 25: note = RNA
gacatttctcaaagtttttacagtg

SEQ ID NO: 940 - DNA, 25 bp, synthetic construct
  source 1..25: mol_type = other DNA
  modified_base 2: mod_base = OTHER; note = 2'-O-methyl modified nucleotide
  modified_base 4: mod_base = OTHER; note = 2'-O-methyl modified nucleotide
  modified_base 14: mod_base = OTHER; note = 2'-O-methyl modified nucleotide
  modified_base 16: mod_base = OTHER; note = 2'-O-methyl modified nucleotide
  misc_feature 1..24: note = RNA
  misc_feature 25: note = DNA
acatttctcaaagtttttaaagtgt

SEQ ID NO: 941 - DNA, 25 bp, synthetic construct
  source 1..25: mol_type = other DNA
  modified_base 2: mod_base = OTHER; note = 2'-O-methyl modified nucleotide
  modified_base 4: mod_base = OTHER; note = 2'-O-methyl modified nucleotide
  modified_base 14: mod_base = OTHER; note = 2'-O-methyl modified nucleotide
  modified_base 16: mod_base = OTHER; note = 2'-O-methyl modified nucleotide
  misc_feature 1..23: note = RNA
  misc_feature 24: note = DNA
  misc_feature 25: note = RNA
catttctcaaagtttttacagtgta

SEQ ID NO: 942 - DNA, 25 bp, synthetic construct
  source 1..25: mol_type = other DNA
  modified_base 2: mod_base = OTHER; note = 2'-O-methyl modified nucleotide
  modified_base 4: mod_base = OTHER; note = 2'-O-methyl modified nucleotide
  modified_base 14: mod_base = OTHER; note = 2'-O-methyl modified nucleotide
  modified_base 16: mod_base = OTHER; note = 2'-O-methyl modified nucleotide
  misc_feature 1..24: note = RNA
  misc_feature 25: note = DNA
atttctcaaagtttttacaatgtat

SEQ ID NO: 943 - DNA, 25 bp, synthetic construct
  source 1..25: mol_type = other DNA
  modified_base 2: mod_base = OTHER; note = 2'-O-methyl modified nucleotide
  modified_base 4: mod_base = OTHER; note = 2'-O-methyl modified nucleotide
  modified_base 14: mod_base = OTHER; note = 2'-O-methyl modified nucleotide
  modified_base 16: mod_base = OTHER; note = 2'-O-methyl modified nucleotide
  misc_feature 1..23: note = RNA
  misc_feature 24: note = DNA
  misc_feature 25: note = RNA
tttctcaaagtttttacagagtatc

SEQ ID NO: 944 - RNA, 25 nt, synthetic construct
  source 1..25: mol_type = other RNA
  modified_base 2: mod_base = OTHER; note = 2'-O-methyl modified nucleotide
  modified_base 4: mod_base = OTHER; note = 2'-O-methyl modified nucleotide
  modified_base 14: mod_base = OTHER; note = 2'-O-methyl modified nucleotide
  modified_base 16: mod_base = OTHER; note = 2'-O-methyl modified nucleotide
gaagtcttccatcagcagtaattga

SEQ ID NO: 945 - DNA, 25 bp, synthetic construct
  source 1..25: mol_type = other DNA
  modified_base 2: mod_base = OTHER; note = 2'-O-methyl modified nucleotide
  modified_base 4: mod_base = OTHER; note = 2'-O-methyl modified nucleotide
  modified_base 14: mod_base = OTHER; note = 2'-O-methyl modified nucleotide
  modified_base 16: mod_base = OTHER; note = 2'-O-methyl modified nucleotide
  misc_feature 1..23: note = RNA
  misc_feature 24: note = DNA
  misc_feature 25: note = RNA
ttccatcagcagtgattgaagtatc

SEQ ID NO: 946 - DNA, 25 bp, synthetic construct
  source 1..25: mol_type = other DNA
  modified_base 2: mod_base = OTHER; note = 2'-O-methyl modified nucleotide
  modified_base 4: mod_base = OTHER; note = 2'-O-methyl modified nucleotide
  modified_base 14: mod_base = OTHER; note = 2'-O-methyl modified nucleotide
  modified_base 16: mod_base = OTHER; note = 2'-O-methyl modified nucleotide
  misc_feature 1..24: note = RNA
  misc_feature 25: note = DNA
tccatcagcagtgattgaaatatct

SEQ ID NO: 947 - DNA, 25 bp, synthetic construct
  source 1..25: mol_type = other DNA
  modified_base 2: mod_base = OTHER; note = 2'-O-methyl modified nucleotide
  modified_base 4: mod_base = OTHER; note = 2'-O-methyl modified nucleotide
  modified_base 14: mod_base = OTHER; note = 2'-O-methyl modified nucleotide
  modified_base 16: mod_base = OTHER; note = 2'-O-methyl modified nucleotide
  misc_feature 1..23: note = RNA
  misc_feature 24: note = DNA
  misc_feature 25: note = RNA
ccatcagcagtgattgaagaatctg

SEQ ID NO: 948 - DNA, 25 bp, synthetic construct
  source 1..25: mol_type = other DNA
  modified_base 2: mod_base = OTHER; note = 2'-O-methyl modified nucleotide
  modified_base 4: mod_base = OTHER; note = 2'-O-methyl modified nucleotide
  modified_base 14: mod_base = OTHER; note = 2'-O-methyl modified nucleotide
  modified_base 16: mod_base = OTHER; note = 2'-O-methyl modified nucleotide
  misc_feature 1..24: note = RNA
  misc_feature 25: note = DNA
catcagcagtgattgaagtatctgt

SEQ ID NO: 949 - DNA, 25 bp, synthetic construct
  source 1..25: mol_type = other DNA
  modified_base 2: mod_base = OTHER; note = 2'-O-methyl modified nucleotide
  modified_base 4: mod_base = OTHER; note = 2'-O-methyl modified nucleotide
  modified_base 14: mod_base = OTHER; note = 2'-O-methyl modified nucleotide
  modified_base 16: mod_base = OTHER; note = 2'-O-methyl modified nucleotide
  misc_feature 1..23: note = RNA
  misc_feature 24: note = DNA
  misc_feature 25: note = RNA
atcagcagtgattgaagtaactgta

SEQ ID NO: 950 - RNA, 25 nt, synthetic construct
  source 1..25: mol_type = other RNA
  modified_base 2: mod_base = OTHER; note = 2'-O-methyl modified nucleotide
  modified_base 4: mod_base = OTHER; note = 2'-O-methyl modified nucleotide
  modified_base 14: mod_base = OTHER; note = 2'-O-methyl modified nucleotide
  modified_base 16: mod_base = OTHER; note = 2'-O-methyl modified nucleotide
tcagcagtgattgaagtatatgtac

SEQ ID NO: 951 - RNA, 25 nt, synthetic construct
  source 1..25: mol_type = other RNA
  modified_base 2: mod_base = OTHER; note = 2'-O-methyl modified nucleotide
  modified_base 4: mod_base = OTHER; note = 2'-O-methyl modified nucleotide
  modified_base 14: mod_base = OTHER; note = 2'-O-methyl modified nucleotide
  modified_base 16: mod_base = OTHER; note = 2'-O-methyl modified nucleotide
cagcagtgattgaagtatcagtacc

SEQ ID NO: 952 - DNA, 25 bp, synthetic construct
  source 1..25: mol_type = other DNA
  modified_base 2: mod_base = OTHER; note = 2'-O-methyl modified nucleotide
  modified_base 4: mod_base = OTHER; note = 2'-O-methyl modified nucleotide
  modified_base 14: mod_base = OTHER; note = 2'-O-methyl modified nucleotide
  modified_base 16: mod_base = OTHER; note = 2'-O-methyl modified nucleotide
  misc_feature 1..24: note = RNA
  misc_feature 25: note = DNA
agcagtgattgaagtatctatacct

SEQ ID NO: 953 - DNA, 25 bp, synthetic construct
  source 1..25: mol_type = other DNA
  modified_base 2: mod_base = OTHER; note = 2'-O-methyl modified nucleotide
  modified_base 4: mod_base = OTHER; note = 2'-O-methyl modified nucleotide
  modified_base 14: mod_base = OTHER; note = 2'-O-methyl modified nucleotide
  modified_base 16: mod_base = OTHER; note = 2'-O-methyl modified nucleotide
  misc_feature 1..23: note = RNA
  misc_feature 24: note = DNA
  misc_feature 25: note = RNA
gcagtgattgaagtatctgaacctg

SEQ ID NO: 954 - RNA, 25 nt, synthetic construct
  source 1..25: mol_type = other RNA
  modified_base 2: mod_base = OTHER; note = 2'-O-methyl modified nucleotide
  modified_base 4: mod_base = OTHER; note = 2'-O-methyl modified nucleotide
  modified_base 14: mod_base = OTHER; note = 2'-O-methyl modified nucleotide
  modified_base 16: mod_base = OTHER; note = 2'-O-methyl modified nucleotide
cagtgattgaagtatctgtacctgc

SEQ ID NO: 955 - RNA, 25 nt, synthetic construct
  source 1..25: mol_type = other RNA
  modified_base 2: mod_base = OTHER; note = 2'-O-methyl modified nucleotide
  modified_base 4: mod_base = OTHER; note = 2'-O-methyl modified nucleotide
  modified_base 14: mod_base = OTHER; note = 2'-O-methyl modified nucleotide
  modified_base 16: mod_base = OTHER; note = 2'-O-methyl modified nucleotide
agtgattgaagtatctgtaactgcc

SEQ ID NO: 956 - RNA, 25 nt, synthetic construct
  source 1..25: mol_type = other RNA
  modified_base 2: mod_base = OTHER; note = 2'-O-methyl modified nucleotide
  modified_base 4: mod_base = OTHER; note = 2'-O-methyl modified nucleotide
  modified_base 14: mod_base = OTHER; note = 2'-O-methyl modified nucleotide
  modified_base 16: mod_base = OTHER; note = 2'-O-methyl modified nucleotide
attgaagtatctgtacctgacccca

SEQ ID NO: 957 - RNA, 25 nt, synthetic construct
  source 1..25: mol_type = other RNA
  modified_base 2: mod_base = OTHER; note = 2'-O-methyl modified nucleotide
  modified_base 4: mod_base = OTHER; note = 2'-O-methyl modified nucleotide
  modified_base 14: mod_base = OTHER; note = 2'-O-methyl modified nucleotide
  modified_base 16: mod_base = OTHER; note = 2'-O-methyl modified nucleotide
catttcggtgcttccctttaactga

SEQ ID NO: 958 - RNA, 25 nt, synthetic construct
  source 1..25: mol_type = other RNA
  modified_base 2: mod_base = OTHER; note = 2'-O-methyl modified nucleotide
  modified_base 4: mod_base = OTHER; note = 2'-O-methyl modified nucleotide
  modified_base 14: mod_base = OTHER; note = 2'-O-methyl modified nucleotide
  modified_base 16: mod_base = OTHER; note = 2'-O-methyl modified nucleotide
cggtgcttccctttcactgaagtga

SEQ ID NO: 959 - RNA, 25 nt, synthetic construct
  source 1..25: mol_type = other RNA
  modified_base 2: mod_base = OTHER; note = 2'-O-methyl modified nucleotide
  modified_base 4: mod_base = OTHER; note = 2'-O-methyl modified nucleotide
  modified_base 14: mod_base = OTHER; note = 2'-O-methyl modified nucleotide
  modified_base 16: mod_base = OTHER; note = 2'-O-methyl modified nucleotide
ggtgcttccctttcactgaagtgaa

SEQ ID NO: 960 - DNA, 25 bp, synthetic construct
  source 1..25: mol_type = other DNA
  modified_base 2: mod_base = OTHER; note = 2'-O-methyl modified nucleotide
  modified_base 4: mod_base = OTHER; note = 2'-O-methyl modified nucleotide
  modified_base 14: mod_base = OTHER; note = 2'-O-methyl modified nucleotide
  modified_base 16: mod_base = OTHER; note = 2'-O-methyl modified nucleotide
  misc_feature 1..24: note = RNA
  misc_feature 25: note = DNA
gtgcttccctttcactgaaatgaat

SEQ ID NO: 961 - DNA, 25 bp, synthetic construct
  source 1..25: mol_type = other DNA
  modified_base 2: mod_base = OTHER; note = 2'-O-methyl modified nucleotide
  modified_base 4: mod_base = OTHER; note = 2'-O-methyl modified nucleotide
  modified_base 14: mod_base = OTHER; note = 2'-O-methyl modified nucleotide
  modified_base 16: mod_base = OTHER; note = 2'-O-methyl modified nucleotide
  misc_feature 1..23: note = RNA
  misc_feature 24: note = DNA
  misc_feature 25: note = RNA
tgcttccctttcactgaagagaata

SEQ ID NO: 962 - RNA, 25 nt, synthetic construct
  source 1..25: mol_type = other RNA
  modified_base 2: mod_base = OTHER; note = 2'-O-methyl modified nucleotide
  modified_base 4: mod_base = OTHER; note = 2'-O-methyl modified nucleotide
  modified_base 14: mod_base = OTHER; note = 2'-O-methyl modified nucleotide
  modified_base 16: mod_base = OTHER; note = 2'-O-methyl modified nucleotide
gcttccctttcactgaagtaaatac

SEQ ID NO: 963 - RNA, 25 nt, synthetic construct
  source 1..25: mol_type = other RNA
  modified_base 2: mod_base = OTHER; note = 2'-O-methyl modified nucleotide
  modified_base 4: mod_base = OTHER; note = 2'-O-methyl modified nucleotide
  modified_base 14: mod_base = OTHER; note = 2'-O-methyl modified nucleotide
  modified_base 16: mod_base = OTHER; note = 2'-O-methyl modified nucleotide
cttccctttcactgaagtgaataca

SEQ ID NO: 964 - DNA, 25 bp, synthetic construct
  source 1..25: mol_type = other DNA
  modified_base 2: mod_base = OTHER; note = 2'-O-methyl modified nucleotide
  modified_base 4: mod_base = OTHER; note = 2'-O-methyl modified nucleotide
  modified_base 14: mod_base = OTHER; note = 2'-O-methyl modified nucleotide
  modified_base 16: mod_base = OTHER; note = 2'-O-methyl modified nucleotide
  misc_feature 1..24: note = RNA
  misc_feature 25: note = DNA
ttccctttcactgaagtgaatacat

SEQ ID NO: 965 - DNA, 25 bp, synthetic construct
  source 1..25: mol_type = other DNA
  modified_base 2: mod_base = OTHER; note = 2'-O-methyl modified nucleotide
  modified_base 4: mod_base = OTHER; note = 2'-O-methyl modified nucleotide
  modified_base 14: mod_base = OTHER; note = 2'-O-methyl modified nucleotide
  modified_base 16: mod_base = OTHER; note = 2'-O-methyl modified nucleotide
  misc_feature 1..23: note = RNA
  misc_feature 24: note = DNA
  misc_feature 25: note = RNA
tccctttcactgaagtgaaaacatg

SEQ ID NO: 966 - RNA, 25 nt, synthetic construct
  source 1..25: mol_type = other RNA
  modified_base 2: mod_base = OTHER; note = 2'-O-methyl modified nucleotide
  modified_base 4: mod_base = OTHER; note = 2'-O-methyl modified nucleotide
  modified_base 14: mod_base = OTHER; note = 2'-O-methyl modified nucleotide
  modified_base 16: mod_base = OTHER; note = 2'-O-methyl modified nucleotide
ccctttcactgaagtgaatacatgg

SEQ ID NO: 967 - DNA, 25 bp, synthetic construct
  source 1..25: mol_type = other DNA
  modified_base 2: mod_base = OTHER; note = 2'-O-methyl modified nucleotide
  modified_base 4: mod_base = OTHER; note = 2'-O-methyl modified nucleotide
  modified_base 14: mod_base = OTHER; note = 2'-O-methyl modified nucleotide
  modified_base 16: mod_base = OTHER; note = 2'-O-methyl modified nucleotide
  misc_feature 1..24: note = RNA
  misc_feature 25: note = DNA
cctttcactgaagtgaataaatggt

SEQ ID NO: 968 - DNA, 25 bp, synthetic construct
  source 1..25: mol_type = other DNA
  modified_base 2: mod_base = OTHER; note = 2'-O-methyl modified nucleotide
  modified_base 4: mod_base = OTHER; note = 2'-O-methyl modified nucleotide
  modified_base 14: mod_base = OTHER; note = 2'-O-methyl modified nucleotide
  modified_base 16: mod_base = OTHER; note = 2'-O-methyl modified nucleotide
  misc_feature 1..23: note = RNA
  misc_feature 24: note = DNA
  misc_feature 25: note = RNA
ctttcactgaagtgaatacatggta

SEQ ID NO: 969 - RNA, 25 nt, synthetic construct
  source 1..25: mol_type = other RNA
  modified_base 2: mod_base = OTHER; note = 2'-O-methyl modified nucleotide
  modified_base 4: mod_base = OTHER; note = 2'-O-methyl modified nucleotide
  modified_base 14: mod_base = OTHER; note = 2'-O-methyl modified nucleotide
  modified_base 16: mod_base = OTHER; note = 2'-O-methyl modified nucleotide
tttcactgaagtgaatacaaggtag

SEQ ID NO: 970 - RNA, 25 nt, synthetic construct
  source 1..25: mol_type = other RNA
  modified_base 2: mod_base = OTHER; note = 2'-O-methyl modified nucleotide
  modified_base 4: mod_base = OTHER; note = 2'-O-methyl modified nucleotide
  modified_base 14: mod_base = OTHER; note = 2'-O-methyl modified nucleotide
  modified_base 16: mod_base = OTHER; note = 2'-O-methyl modified nucleotide
ttcactgaagtgaatacatagtagc

SEQ ID NO: 971 - RNA, 25 nt, synthetic construct
  source 1..25: mol_type = other RNA
  modified_base 2: mod_base = OTHER; note = 2'-O-methyl modified nucleotide
  modified_base 4: mod_base = OTHER; note = 2'-O-methyl modified nucleotide
  modified_base 14: mod_base = OTHER; note = 2'-O-methyl modified nucleotide
  modified_base 16: mod_base = OTHER; note = 2'-O-methyl modified nucleotide
tcactgaagtgaatacatgatagca

SEQ ID NO: 972 - RNA, 25 nt, synthetic construct
  source 1..25: mol_type = other RNA
  modified_base 2: mod_base = OTHER; note = 2'-O-methyl modified nucleotide
  modified_base 4: mod_base = OTHER; note = 2'-O-methyl modified nucleotide
  modified_base 14: mod_base = OTHER; note = 2'-O-methyl modified nucleotide
  modified_base 16: mod_base = OTHER; note = 2'-O-methyl modified nucleotide
cactgaagtgaatacatggaagcag

SEQ ID NO: 973 - RNA, 25 nt, synthetic construct
  source 1..25: mol_type = other RNA
  modified_base 2: mod_base = OTHER; note = 2'-O-methyl modified nucleotide
  modified_base 4: mod_base = OTHER; note = 2'-O-methyl modified nucleotide
  modified_base 14: mod_base = OTHER; note = 2'-O-methyl modified nucleotide
  modified_base 16: mod_base = OTHER; note = 2'-O-methyl modified nucleotide
actgaagtgaatacatggtagcagg

SEQ ID NO: 974 - RNA, 25 nt, synthetic construct
  source 1..25: mol_type = other RNA
  modified_base 2: mod_base = OTHER; note = 2'-O-methyl modified nucleotide
  modified_base 4: mod_base = OTHER; note = 2'-O-methyl modified nucleotide
  modified_base 14: mod_base = OTHER; note = 2'-O-methyl modified nucleotide
  modified_base 16: mod_base = OTHER; note = 2'-O-methyl modified nucleotide
ctgaagtgaatacatggtaacaggg

SEQ ID NO: 975 - DNA, 25 bp, synthetic construct
  source 1..25: mol_type = other DNA
  modified_base 2: mod_base = OTHER; note = 2'-O-methyl modified nucleotide
  modified_base 4: mod_base = OTHER; note = 2'-O-methyl modified nucleotide
  modified_base 14: mod_base = OTHER; note = 2'-O-methyl modified nucleotide
  modified_base 16: mod_base = OTHER; note = 2'-O-methyl modified nucleotide
  misc_feature 1..24: note = RNA
  misc_feature 25: note = DNA
tgaagtgaatacatggtagaagggt

SEQ ID NO: 976 - DNA, 25 bp, synthetic construct
  source 1..25: mol_type = other DNA
  modified_base 2: mod_base = OTHER; note = 2'-O-methyl modified nucleotide
  modified_base 4: mod_base = OTHER; note = 2'-O-methyl modified nucleotide
  modified_base 14: mod_base = OTHER; note = 2'-O-methyl modified nucleotide
  modified_base 16: mod_base = OTHER; note = 2'-O-methyl modified nucleotide
  misc_feature 1..24: note = RNA
  misc_feature 25: note = DNA
aagtgaatacatggtagcaaggtct

SEQ ID NO: 977 - DNA, 25 bp, synthetic construct
  source 1..25: mol_type = other DNA
  modified_base 2: mod_base = OTHER; note = 2'-O-methyl modified nucleotide
  modified_base 4: mod_base = OTHER; note = 2'-O-methyl modified nucleotide
  modified_base 14: mod_base = OTHER; note = 2'-O-methyl modified nucleotide
  modified_base 16: mod_base = OTHER; note = 2'-O-methyl modified nucleotide
  misc_feature 1..23: note = RNA
  misc_feature 24..25: note = DNA
agtgaatacatggtagcagagtctt

SEQ ID NO: 978 - DNA, 25 bp, synthetic construct
  source 1..25: mol_type = other DNA
  modified_base 2: mod_base = OTHER; note = 2'-O-methyl modified nucleotide
  modified_base 4: mod_base = OTHER; note = 2'-O-methyl modified nucleotide
  modified_base 14: mod_base = OTHER; note = 2'-O-methyl modified nucleotide
  modified_base 16: mod_base = OTHER; note = 2'-O-methyl modified nucleotide
  misc_feature 1..23: note = RNA
  misc_feature 24..25: note = DNA
gtgaatacatggtagcaggatcttt

SEQ ID NO: 979 - DNA, 25 bp, synthetic construct
  source 1..25: mol_type = other DNA
  modified_base 2: mod_base = OTHER; note = 2'-O-methyl modified nucleotide
  modified_base 4: mod_base = OTHER; note = 2'-O-methyl modified nucleotide
  modified_base 14: mod_base = OTHER; note = 2'-O-methyl modified nucleotide
  modified_base 16: mod_base = OTHER; note = 2'-O-methyl modified nucleotide
  misc_feature 1..24: note = RNA
  misc_feature 25: note = DNA
gaatacatggtagcagggtatttgt

SEQ ID NO: 980 - DNA, 25 bp, synthetic construct
  source 1..25: mol_type = other DNA
  modified_base 2: mod_base = OTHER; note = 2'-O-methyl modified nucleotide
  modified_base 4: mod_base = OTHER; note = 2'-O-methyl modified nucleotide
  modified_base 14: mod_base = OTHER; note = 2'-O-methyl modified nucleotide
  modified_base 16: mod_base = OTHER; note = 2'-O-methyl modified nucleotide
  misc_feature 1..23: note = RNA
  misc_feature 24: note = DNA
  misc_feature 25: note = RNA
aatacatggtagcagggtcattgtg

SEQ ID NO: 981 - DNA, 25 bp, synthetic construct
  source 1..25: mol_type = other DNA
  modified_base 2: mod_base = OTHER; note = 2'-O-methyl modified nucleotide
  modified_base 4: mod_base = OTHER; note = 2'-O-methyl modified nucleotide
  modified_base 14: mod_base = OTHER; note = 2'-O-methyl modified nucleotide
  modified_base 16: mod_base = OTHER; note = 2'-O-methyl modified nucleotide
  misc_feature 1..23: note = RNA
  misc_feature 24: note = DNA
  misc_feature 25: note = RNA
ggtagcagggtctttgtgtactgtg

SEQ ID NO: 982 - DNA, 25 bp, synthetic construct
  source 1..25: mol_type = other DNA
  modified_base 2: mod_base = OTHER; note = 2'-O-methyl modified nucleotide
  modified_base 4: mod_base = OTHER; note = 2'-O-methyl modified nucleotide
  modified_base 14: mod_base = OTHER; note = 2'-O-methyl modified nucleotide
  modified_base 16: mod_base = OTHER; note = 2'-O-methyl modified nucleotide
  misc_feature 1..23: note = RNA
  misc_feature 24..25: note = DNA
agggtctttgtgtgctgtgaatttt

SEQ ID NO: 983 - DNA, 25 bp, synthetic construct
  source 1..25: mol_type = other DNA
  modified_base 2: mod_base = OTHER; note = 2'-O-methyl modified nucleotide
  modified_base 4: mod_base = OTHER; note = 2'-O-methyl modified nucleotide
  modified_base 14: mod_base = OTHER; note = 2'-O-methyl modified nucleotide
  modified_base 16: mod_base = OTHER; note = 2'-O-methyl modified nucleotide
  misc_feature 1..24: note = RNA
  misc_feature 25: note = DNA
ggtctttgtgtgctgtggaatttgt

SEQ ID NO: 984 - DNA, 25 bp, synthetic construct
  source 1..25: mol_type = other DNA
  modified_base 2: mod_base = OTHER; note = 2'-O-methyl modified nucleotide
  modified_base 4: mod_base = OTHER; note = 2'-O-methyl modified nucleotide
  modified_base 14: mod_base = OTHER; note = 2'-O-methyl modified nucleotide
  modified_base 16: mod_base = OTHER; note = 2'-O-methyl modified nucleotide
  misc_feature 1..23: note = RNA
  misc_feature 24: note = DNA
  misc_feature 25: note = RNA
tgtgtgctgtggattttgtagcttc

SEQ ID NO: 985 - RNA, 25 nt, synthetic construct
  source 1..25: mol_type = other RNA
  modified_base 2: mod_base = OTHER; note = 2'-O-methyl modified nucleotide
  modified_base 4: mod_base = OTHER; note = 2'-O-methyl modified nucleotide
  modified_base 14: mod_base = OTHER; note = 2'-O-methyl modified nucleotide
  modified_base 16: mod_base = OTHER; note = 2'-O-methyl modified nucleotide
gtgtgctgtggattttgtgacttca

SEQ ID NO: 986 - RNA, 25 nt, synthetic construct
  source 1..25: mol_type = other RNA
  modified_base 2: mod_base = OTHER; note = 2'-O-methyl modified nucleotide
  modified_base 4: mod_base = OTHER; note = 2'-O-methyl modified nucleotide
  modified_base 14: mod_base = OTHER; note = 2'-O-methyl modified nucleotide
  modified_base 16: mod_base = OTHER; note = 2'-O-methyl modified nucleotide
tgtgctgtggattttgtggattcaa

SEQ ID NO: 987 - DNA, 25 bp, synthetic construct
  source 1..25: mol_type = other DNA
  modified_base 2: mod_base = OTHER; note = 2'-O-methyl modified nucleotide
  modified_base 4: mod_base = OTHER; note = 2'-O-methyl modified nucleotide
  modified_base 14: mod_base = OTHER; note = 2'-O-methyl modified nucleotide
  modified_base 16: mod_base = OTHER; note = 2'-O-methyl modified nucleotide
  misc_feature 1..24: note = RNA
  misc_feature 25: note = DNA
gtgctgtggattttgtggcatcaat

SEQ ID NO: 988 - DNA, 25 bp, synthetic construct
  source 1..25: mol_type = other DNA
  modified_base 2: mod_base = OTHER; note = 2'-O-methyl modified nucleotide
  modified_base 4: mod_base = OTHER; note = 2'-O-methyl modified nucleotide
  modified_base 14: mod_base = OTHER; note = 2'-O-methyl modified nucleotide
  modified_base 16: mod_base = OTHER; note = 2'-O-methyl modified nucleotide
  misc_feature 1..23: note = RNA
  misc_feature 24: note = DNA
  misc_feature 25: note = RNA
tgctgtggattttgtggctacaatc

SEQ ID NO: 989 - DNA, 25 bp, synthetic construct
  source 1..25: mol_type = other DNA
  modified_base 2: mod_base = OTHER; note = 2'-O-methyl modified nucleotide
  modified_base 4: mod_base = OTHER; note = 2'-O-methyl modified nucleotide
  modified_base 14: mod_base = OTHER; note = 2'-O-methyl modified nucleotide
  modified_base 16: mod_base = OTHER; note = 2'-O-methyl modified nucleotide
  misc_feature 1..24: note = RNA
  misc_feature 25: note = DNA
gctgtggattttgtggcttaaatct

SEQ ID NO: 990 - DNA, 25 bp, synthetic construct
  source 1..25: mol_type = other DNA
  modified_base 2: mod_base = OTHER; note = 2'-O-methyl modified nucleotide
  modified_base 4: mod_base = OTHER; note = 2'-O-methyl modified nucleotide
  modified_base 14: mod_base = OTHER; note = 2'-O-methyl modified nucleotide
  modified_base 16: mod_base = OTHER; note = 2'-O-methyl modified nucleotide
  misc_feature 1..23: note = RNA
  misc_feature 24: note = DNA
  misc_feature 25: note = RNA
ctgtggattttgtggcttcaatcta

SEQ ID NO: 991 - RNA, 25 nt, synthetic construct
  source 1..25: mol_type = other RNA
  modified_base 2: mod_base = OTHER; note = 2'-O-methyl modified nucleotide
  modified_base 4: mod_base = OTHER; note = 2'-O-methyl modified nucleotide
  modified_base 14: mod_base = OTHER; note = 2'-O-methyl modified nucleotide
  modified_base 16: mod_base = OTHER; note = 2'-O-methyl modified nucleotide
gtggattttgtggcttcaaactacg

SEQ ID NO: 992 - RNA, 25 nt, synthetic construct
  source 1..25: mol_type = other RNA
  modified_base 2: mod_base = OTHER; note = 2'-O-methyl modified nucleotide
  modified_base 4: mod_base = OTHER; note = 2'-O-methyl modified nucleotide
  modified_base 14: mod_base = OTHER; note = 2'-O-methyl modified nucleotide
  modified_base 16: mod_base = OTHER; note = 2'-O-methyl modified nucleotide
tggattttgtggcttcaatatacga

SEQ ID NO: 993 - DNA, 25 bp, synthetic construct
  source 1..25: mol_type = other DNA
  modified_base 2: mod_base = OTHER; note = 2'-O-methyl modified nucleotide
  modified_base 4: mod_base = OTHER; note = 2'-O-methyl modified nucleotide
  modified_base 14: mod_base = OTHER; note = 2'-O-methyl modified nucleotide
  modified_base 16: mod_base = OTHER; note = 2'-O-methyl modified nucleotide
  misc_feature 1..23: note = RNA
  misc_feature 24: note = DNA
  misc_feature 25: note = RNA
gattttgtggcttcaatctacgatg

SEQ ID NO: 994 - DNA, 25 bp, synthetic construct
  source 1..25: mol_type = other DNA
  modified_base 2: mod_base = OTHER; note = 2'-O-methyl modified nucleotide
  modified_base 4: mod_base = OTHER; note = 2'-O-methyl modified nucleotide
  modified_base 14: mod_base = OTHER; note = 2'-O-methyl modified nucleotide
  modified_base 16: mod_base = OTHER; note = 2'-O-methyl modified nucleotide
  misc_feature 1..24: note = RNA
  misc_feature 25: note = DNA
attttgtggcttcaatctaagatgt

SEQ ID NO: 995 - DNA, 25 bp, synthetic construct
  source 1..25: mol_type = other DNA
  modified_base 2: mod_base = OTHER; note = 2'-O-methyl modified nucleotide
  modified_base 4: mod_base = OTHER; note = 2'-O-methyl modified nucleotide
  modified_base 14: mod_base = OTHER; note = 2'-O-methyl modified nucleotide
  modified_base 16: mod_base = OTHER; note = 2'-O-methyl modified nucleotide
  misc_feature 1..24: note = RNA
  misc_feature 25: note = DNA
ccacttatttctaaatcctaactat

SEQ ID NO: 996 - DNA, 25 bp, synthetic construct
  source 1..25: mol_type = other DNA
  modified_base 2: mod_base = OTHER; note = 2'-O-methyl modified nucleotide
  modified_base 4: mod_base = OTHER; note = 2'-O-methyl modified nucleotide
  modified_base 14: mod_base = OTHER; note = 2'-O-methyl modified nucleotide
  modified_base 16: mod_base = OTHER; note = 2'-O-methyl modified nucleotide
  misc_feature 1..23: note = RNA
  misc_feature 24..25: note = DNA
cacttatttctaaatcctcactatt

SEQ ID NO: 997 - DNA, 25 bp, synthetic construct
  source 1..25: mol_type = other DNA
  modified_base 2: mod_base = OTHER; note = 2'-O-methyl modified nucleotide
  modified_base 4: mod_base = OTHER; note = 2'-O-methyl modified nucleotide
  modified_base 14: mod_base = OTHER; note = 2'-O-methyl modified nucleotide
  modified_base 16: mod_base = OTHER; note = 2'-O-methyl modified nucleotide
  misc_feature 1..23: note = RNA
  misc_feature 24..25: note = DNA
acttatttctaaatcctcaatattt

SEQ ID NO: 998 - DNA, 25 bp, synthetic construct
  source 1..25: mol_type = other DNA
  modified_base 2: mod_base = OTHER; note = 2'-O-methyl modified nucleotide
  modified_base 4: mod_base = OTHER; note = 2'-O-methyl modified nucleotide
  modified_base 14: mod_base = OTHER; note = 2'-O-methyl modified nucleotide
  modified_base 16: mod_base = OTHER; note = 2'-O-methyl modified nucleotide
  misc_feature 1..23: note = RNA
  misc_feature 24..25: note = DNA
cttatttctaaatcctcacaatttt

SEQ ID NO: 999 - DNA, 25 bp, synthetic construct
  source 1..25: mol_type = other DNA
  modified_base 2: mod_base = OTHER; note = 2'-O-methyl modified nucleotide
  modified_base 4: mod_base = OTHER; note = 2'-O-methyl modified nucleotide
  modified_base 14: mod_base = OTHER; note = 2'-O-methyl modified nucleotide
  modified_base 16: mod_base = OTHER; note = 2'-O-methyl modified nucleotide
  misc_feature 1..23: note = RNA
  misc_feature 24..25: note = DNA
tatttctaaatcctcactaattttt

SEQ ID NO: 1000 - DNA, 25 bp, synthetic construct
  source 1..25: mol_type = other DNA
  modified_base 2: mod_base = OTHER; note = 2'-O-methyl modified nucleotide
  modified_base 4: mod_base = OTHER; note = 2'-O-methyl modified nucleotide
  modified_base 14: mod_base = OTHER; note = 2'-O-methyl modified nucleotide
  modified_base 16: mod_base = OTHER; note = 2'-O-methyl modified nucleotide
  misc_feature 1..23: note = RNA
  misc_feature 24..25: note = DNA
atttctaaatcctcactatattttt

SEQ ID NO: 1001 - DNA, 25 bp, synthetic construct
  source 1..25: mol_type = other DNA
  modified_base 2: mod_base = OTHER; note = 2'-O-methyl modified nucleotide
  modified_base 4: mod_base = OTHER; note = 2'-O-methyl modified nucleotide
  modified_base 14: mod_base = OTHER; note = 2'-O-methyl modified nucleotide
  modified_base 16: mod_base = OTHER; note = 2'-O-methyl modified nucleotide
  misc_feature 1..23: note = RNA
  misc_feature 24: note = DNA
  misc_feature 25: note = RNA
tttctaaatcctcactattattttg

SEQ ID NO: 1002 - DNA, 25 bp, synthetic construct
  source 1..25: mol_type = other DNA
  modified_base 2: mod_base = OTHER; note = 2'-O-methyl modified nucleotide
  modified_base 4: mod_base = OTHER; note = 2'-O-methyl modified nucleotide
  modified_base 14: mod_base = OTHER; note = 2'-O-methyl modified nucleotide
  modified_base 16: mod_base = OTHER; note = 2'-O-methyl modified nucleotide
  misc_feature 1..24: note = RNA
  misc_feature 25: note = DNA
ttctaaatcctcactatttatttgt

SEQ ID NO: 1003 - DNA, 25 bp, synthetic construct
  source 1..25: mol_type = other DNA
  modified_base 2: mod_base = OTHER; note = 2'-O-methyl modified nucleotide
  modified_base 4: mod_base = OTHER; note = 2'-O-methyl modified nucleotide
  modified_base 14: mod_base = OTHER; note = 2'-O-methyl modified nucleotide
  modified_base 16: mod_base = OTHER; note = 2'-O-methyl modified nucleotide
  misc_feature 1..23: note = RNA
  misc_feature 24..25: note = DNA
tctaaatcctcactattttattgtt

SEQ ID NO: 1004 - DNA, 25 bp, synthetic construct
  source 1..25: mol_type = other DNA
  modified_base 2: mod_base = OTHER; note = 2'-O-methyl modified nucleotide
  modified_base 4: mod_base = OTHER; note = 2'-O-methyl modified nucleotide
  modified_base 14: mod_base = OTHER; note = 2'-O-methyl modified nucleotide
  modified_base 16: mod_base = OTHER; note = 2'-O-methyl modified nucleotide
  misc_feature 1..23: note = RNA
  misc_feature 24: note = DNA
  misc_feature 25: note = RNA
ctaaatcctcactatttttatgttg

SEQ ID NO: 1005 - RNA, 25 nt, synthetic construct
  source 1..25: mol_type = other RNA
  modified_base 2: mod_base = OTHER; note = 2'-O-methyl modified nucleotide
  modified_base 4: mod_base = OTHER; note = 2'-O-methyl modified nucleotide
  modified_base 14: mod_base = OTHER; note = 2'-O-methyl modified nucleotide
  modified_base 16: mod_base = OTHER; note = 2'-O-methyl modified nucleotide
taaatcctcactattttttagttgc

SEQ ID NO: 1006 - DNA, 25 bp, synthetic construct
  source 1..25: mol_type = other DNA
  modified_base 2: mod_base = OTHER; note = 2'-O-methyl modified nucleotide
  modified_base 4: mod_base = OTHER; note = 2'-O-methyl modified nucleotide
  modified_base 14: mod_base = OTHER; note = 2'-O-methyl modified nucleotide
  modified_base 16: mod_base = OTHER; note = 2'-O-methyl modified nucleotide
  misc_feature 1..24: note = RNA
  misc_feature 25: note = DNA
aaatcctcactatttttttattgct

SEQ ID NO: 1007 - DNA, 25 bp, synthetic construct
  source 1..25: mol_type = other DNA
  modified_base 2: mod_base = OTHER; note = 2'-O-methyl modified nucleotide
  modified_base 4: mod_base = OTHER; note = 2'-O-methyl modified nucleotide
  modified_base 14: mod_base = OTHER; note = 2'-O-methyl modified nucleotide
  modified_base 16: mod_base = OTHER; note = 2'-O-methyl modified nucleotide
  misc_feature 1..23: note = RNA
  misc_feature 24: note = DNA
  misc_feature 25: note = RNA
aatcctcactatttttttgatgctg

SEQ ID NO: 1008 - DNA, 25 bp, synthetic construct
  source 1..25: mol_type = other DNA
  modified_base 2: mod_base = OTHER; note = 2'-O-methyl modified nucleotide
  modified_base 4: mod_base = OTHER; note = 2'-O-methyl modified nucleotide
  modified_base 14: mod_base = OTHER; note = 2'-O-methyl modified nucleotide
  modified_base 16: mod_base = OTHER; note = 2'-O-methyl modified nucleotide
  misc_feature 1..24: note = RNA
  misc_feature 25: note = DNA
atcctcactatttttttgtagctgt

SEQ ID NO: 1009 - DNA, 25 bp, synthetic construct
  source 1..25: mol_type = other DNA
  modified_base 2: mod_base = OTHER; note = 2'-O-methyl modified nucleotide
  modified_base 4: mod_base = OTHER; note = 2'-O-methyl modified nucleotide
  modified_base 14: mod_base = OTHER; note = 2'-O-methyl modified nucleotide
  modified_base 16: mod_base = OTHER; note = 2'-O-methyl modified nucleotide
  misc_feature 1..23: note = RNA
  misc_feature 24..25: note = DNA
tcctcactatttttttgttactgtt

SEQ ID NO: 1010 - DNA, 25 bp, synthetic construct
  source 1..25: mol_type = other DNA
  modified_base 2: mod_base = OTHER; note = 2'-O-methyl modified nucleotide
  modified_base 4: mod_base = OTHER; note = 2'-O-methyl modified nucleotide
  modified_base 14: mod_base = OTHER; note = 2'-O-methyl modified nucleotide
  modified_base 16: mod_base = OTHER; note = 2'-O-methyl modified nucleotide
  misc_feature 1..23: note = RNA
  misc_feature 24: note = DNA
  misc_feature 25: note = RNA
cctcactatttttttgttgatgttg

SEQ ID NO: 1011 - DNA, 25 bp, synthetic construct
  source 1..25: mol_type = other DNA
  modified_base 2: mod_base = OTHER; note = 2'-O-methyl modified nucleotide
  modified_base 4: mod_base = OTHER; note = 2'-O-methyl modified nucleotide
  modified_base 14: mod_base = OTHER; note = 2'-O-methyl modified nucleotide
  modified_base 16: mod_base = OTHER; note = 2'-O-methyl modified nucleotide
  misc_feature 1..24: note = RNA
  misc_feature 25: note = DNA
ctcactatttttttgttgcagttgt

SEQ ID NO: 1012 - DNA, 25 bp, synthetic construct
  source 1..25: mol_type = other DNA
  modified_base 2: mod_base = OTHER; note = 2'-O-methyl modified nucleotide
  modified_base 4: mod_base = OTHER; note = 2'-O-methyl modified nucleotide
  modified_base 14: mod_base = OTHER; note = 2'-O-methyl modified nucleotide
  modified_base 16: mod_base = OTHER; note = 2'-O-methyl modified nucleotide
  misc_feature 1..23: note = RNA
  misc_feature 24..25: note = DNA
tcactatttttttgttgctattgtt

SEQ ID NO: 1013 - DNA, 25 bp, synthetic construct
  source 1..25: mol_type = other DNA
  modified_base 2: mod_base = OTHER; note = 2'-O-methyl modified nucleotide
  modified_base 4: mod_base = OTHER; note = 2'-O-methyl modified nucleotide
  modified_base 14: mod_base = OTHER; note = 2'-O-methyl modified nucleotide
  modified_base 16: mod_base = OTHER; note = 2'-O-methyl modified nucleotide
  misc_feature 1..23: note = RNA
  misc_feature 24: note = DNA
  misc_feature 25: note = RNA
cactatttttttgttgctgatgttc

SEQ ID NO: 1014 - RNA, 25 nt, synthetic construct
  source 1..25: mol_type = other RNA
  modified_base 2: mod_base = OTHER; note = 2'-O-methyl modified nucleotide
  modified_base 4: mod_base = OTHER; note = 2'-O-methyl modified nucleotide
  modified_base 14: mod_base = OTHER; note = 2'-O-methyl modified nucleotide
  modified_base 16: mod_base = OTHER; note = 2'-O-methyl modified nucleotide
actatttttttgttgctgtagttca

SEQ ID NO: 1015 - RNA, 25 nt, synthetic construct
  source 1..25: mol_type = other RNA
  modified_base 2: mod_base = OTHER; note = 2'-O-methyl modified nucleotide
  modified_base 4: mod_base = OTHER; note = 2'-O-methyl modified nucleotide
  modified_base 14: mod_base = OTHER; note = 2'-O-methyl modified nucleotide
  modified_base 16: mod_base = OTHER; note = 2'-O-methyl modified nucleotide
ctatttttttgttgctgttattcag

SEQ ID NO: 1016 - RNA, 25 nt, synthetic construct
  source 1..25: mol_type = other RNA
  modified_base 2: mod_base = OTHER; note = 2'-O-methyl modified nucleotide
  modified_base 4: mod_base = OTHER; note = 2'-O-methyl modified nucleotide
  modified_base 14: mod_base = OTHER; note = 2'-O-methyl modified nucleotide
  modified_base 16: mod_base = OTHER; note = 2'-O-methyl modified nucleotide
tatttttttgttgctgttgatcaga

SEQ ID NO: 1017 - RNA, 25 nt, synthetic construct
  source 1..25: mol_type = other RNA
  modified_base 2: mod_base = OTHER; note = 2'-O-methyl modified nucleotide
  modified_base 4: mod_base = OTHER; note = 2'-O-methyl modified nucleotide
  modified_base 14: mod_base = OTHER; note = 2'-O-methyl modified nucleotide
  modified_base 16: mod_base = OTHER; note = 2'-O-methyl modified nucleotide
atttttttgttgctgttgtacagaa

SEQ ID NO: 1018 - RNA, 25 nt, synthetic construct
  source 1..25: mol_type = other RNA
  modified_base 2: mod_base = OTHER; note = 2'-O-methyl modified nucleotide
  modified_base 4: mod_base = OTHER; note = 2'-O-methyl modified nucleotide
  modified_base 14: mod_base = OTHER; note = 2'-O-methyl modified nucleotide
  modified_base 16: mod_base = OTHER; note = 2'-O-methyl modified nucleotide
tttttttgttgctgttgttaagaag

SEQ ID NO: 1019 - DNA, 25 bp, synthetic construct
  source 1..25: mol_type = other DNA
  modified_base 2: mod_base = OTHER; note = 2'-O-methyl modified nucleotide
  modified_base 4: mod_base = OTHER; note = 2'-O-methyl modified nucleotide
  modified_base 14: mod_base = OTHER; note = 2'-O-methyl modified nucleotide
  modified_base 16: mod_base = OTHER; note = 2'-O-methyl modified nucleotide
  misc_feature 1..24: note = RNA
  misc_feature 25: note = DNA
ttttttgttgctgttgttcagaagt

SEQ ID NO: 1020 - DNA, 25 bp, synthetic construct
  source 1..25: mol_type = other DNA
  modified_base 2: mod_base = OTHER; note = 2'-O-methyl modified nucleotide
  modified_base 4: mod_base = OTHER; note = 2'-O-methyl modified nucleotide
  modified_base 14: mod_base = OTHER; note = 2'-O-methyl modified nucleotide
  modified_base 16: mod_base = OTHER; note = 2'-O-methyl modified nucleotide
  misc_feature 1..23: note = RNA
  misc_feature 24..25: note = DNA
tttttgttgctgttgttcaaaagtt

SEQ ID NO: 1021 - DNA, 25 bp, synthetic construct
  source 1..25: mol_type = other DNA
  modified_base 2: mod_base = OTHER; note = 2'-O-methyl modified nucleotide
  modified_base 4: mod_base = OTHER; note = 2'-O-methyl modified nucleotide
  modified_base 14: mod_base = OTHER; note = 2'-O-methyl modified nucleotide
  modified_base 16: mod_base = OTHER; note = 2'-O-methyl modified nucleotide
  misc_feature 1..23: note = RNA
  misc_feature 24: note = DNA
  misc_feature 25: note = RNA
ttttgttgctgttgttcagaagttg

SEQ ID NO: 1022 - DNA, 25 bp, synthetic construct
  source 1..25: mol_type = other DNA
  modified_base 2: mod_base = OTHER; note = 2'-O-methyl modified nucleotide
  modified_base 4: mod_base = OTHER; note = 2'-O-methyl modified nucleotide
  modified_base 14: mod_base = OTHER; note = 2'-O-methyl modified nucleotide
  modified_base 16: mod_base = OTHER; note = 2'-O-methyl modified nucleotide
  misc_feature 1..24: note = RNA
  misc_feature 25: note = DNA
tttgttgctgttgttcagaagttgt

SEQ ID NO: 1023 - DNA, 25 bp, synthetic construct
  source 1..25: mol_type = other DNA
  modified_base 2: mod_base = OTHER; note = 2'-O-methyl modified nucleotide
  modified_base 4: mod_base = OTHER; note = 2'-O-methyl modified nucleotide
  modified_base 14: mod_base = OTHER; note = 2'-O-methyl modified nucleotide
  modified_base 16: mod_base = OTHER; note = 2'-O-methyl modified nucleotide
  misc_feature 1..23: note = RNA
  misc_feature 24..25: note = DNA
ttgttgctgttgttcagaaattgtt

SEQ ID NO: 1024 - DNA, 25 bp, synthetic construct
  source 1..25: mol_type = other DNA
  modified_base 2: mod_base = OTHER; note = 2'-O-methyl modified nucleotide
  modified_base 4: mod_base = OTHER; note = 2'-O-methyl modified nucleotide
  modified_base 14: mod_base = OTHER; note = 2'-O-methyl modified nucleotide
  modified_base 16: mod_base = OTHER; note = 2'-O-methyl modified nucleotide
  misc_feature 1..23: note = RNA
  misc_feature 24: note = DNA
  misc_feature 25: note = RNA
tgttgctgttgttcagaagatgtta

SEQ ID NO: 1025 - RNA, 25 nt, synthetic construct
  source 1..25: mol_type = other RNA
  modified_base 2: mod_base = OTHER; note = 2'-O-methyl modified nucleotide
  modified_base 4: mod_base = OTHER; note = 2'-O-methyl modified nucleotide
  modified_base 14: mod_base = OTHER; note = 2'-O-methyl modified nucleotide
  modified_base 16: mod_base = OTHER; note = 2'-O-methyl modified nucleotide
gttgctgttgttcagaagtagttag

SEQ ID NO: 1026 - DNA, 25 bp, synthetic construct
  source 1..25: mol_type = other DNA
  modified_base 2: mod_base = OTHER; note = 2'-O-methyl modified nucleotide
  modified_base 4: mod_base = OTHER; note = 2'-O-methyl modified nucleotide
  modified_base 14: mod_base = OTHER; note = 2'-O-methyl modified nucleotide
  modified_base 16: mod_base = OTHER; note = 2'-O-methyl modified nucleotide
  misc_feature 1..24: note = RNA
  misc_feature 25: note = DNA
ttgctgttgttcagaagttattagt

SEQ ID NO: 1027 - DNA, 25 bp, synthetic construct
  source 1..25: mol_type = other DNA
  modified_base 2: mod_base = OTHER; note = 2'-O-methyl modified nucleotide
  modified_base 4: mod_base = OTHER; note = 2'-O-methyl modified nucleotide
  modified_base 14: mod_base = OTHER; note = 2'-O-methyl modified nucleotide
  modified_base 16: mod_base = OTHER; note = 2'-O-methyl modified nucleotide
  misc_feature 1..23: note = RNA
  misc_feature 24: note = DNA
  misc_feature 25: note = RNA
tgctgttgttcagaagttgatagtg

SEQ ID NO: 1028 - RNA, 25 nt, synthetic construct
  source 1..25: mol_type = other RNA
  modified_base 2: mod_base = OTHER; note = 2'-O-methyl modified nucleotide
  modified_base 4: mod_base = OTHER; note = 2'-O-methyl modified nucleotide
  modified_base 14: mod_base = OTHER; note = 2'-O-methyl modified nucleotide
  modified_base 16: mod_base = OTHER; note = 2'-O-methyl modified nucleotide
gctgttgttcagaagttgtaagtga

SEQ ID NO: 1029 - DNA, 25 bp, synthetic construct
  source 1..25: mol_type = other DNA
  modified_base 2: mod_base = OTHER; note = 2'-O-methyl modified nucleotide
  modified_base 4: mod_base = OTHER; note = 2'-O-methyl modified nucleotide
  modified_base 14: mod_base = OTHER; note = 2'-O-methyl modified nucleotide
  modified_base 16: mod_base = OTHER; note = 2'-O-methyl modified nucleotide
  misc_feature 1..24: note = RNA
  misc_feature 25: note = DNA
ctgttgttcagaagttgttagtgat

SEQ ID NO: 1030 - DNA, 25 bp, synthetic construct
  source 1..25: mol_type = other DNA
  modified_base 2: mod_base = OTHER; note = 2'-O-methyl modified nucleotide
  modified_base 4: mod_base = OTHER; note = 2'-O-methyl modified nucleotide
  modified_base 14: mod_base = OTHER; note = 2'-O-methyl modified nucleotide
  modified_base 16: mod_base = OTHER; note = 2'-O-methyl modified nucleotide
  misc_feature 1..23: note = RNA
  misc_feature 24..25: note = DNA
tgttgttcagaagttgttaatgatt

SEQ ID NO: 1031 - DNA, 25 bp, synthetic construct
  source 1..25: mol_type = other DNA
  modified_base 2: mod_base = OTHER; note = 2'-O-methyl modified nucleotide
  modified_base 4: mod_base = OTHER; note = 2'-O-methyl modified nucleotide
  modified_base 14: mod_base = OTHER; note = 2'-O-methyl modified nucleotide
  modified_base 16: mod_base = OTHER; note = 2'-O-methyl modified nucleotide
  misc_feature 1..23: note = RNA
  misc_feature 24..25: note = DNA
gttgttcagaagttgttagagattt

SEQ ID NO: 1032 - DNA, 25 bp, synthetic construct
  source 1..25: mol_type = other DNA
  modified_base 2: mod_base = OTHER; note = 2'-O-methyl modified nucleotide
  modified_base 4: mod_base = OTHER; note = 2'-O-methyl modified nucleotide
  modified_base 14: mod_base = OTHER; note = 2'-O-methyl modified nucleotide
  modified_base 16: mod_base = OTHER; note = 2'-O-methyl modified nucleotide
  misc_feature 1..23: note = RNA
  misc_feature 24: note = DNA
  misc_feature 25: note = RNA
ttgttcagaagttgttagtaatttg

SEQ ID NO: 1033 - RNA, 25 nt, synthetic construct
  source 1..25: mol_type = other RNA
  modified_base 2: mod_base = OTHER; note = 2'-O-methyl modified nucleotide
  modified_base 4: mod_base = OTHER; note = 2'-O-methyl modified nucleotide
  modified_base 14: mod_base = OTHER; note = 2'-O-methyl modified nucleotide
  modified_base 16: mod_base = OTHER; note = 2'-O-methyl modified nucleotide
tgttcagaagttgttagtgatttgc

SEQ ID NO: 1034 - DNA, 25 bp, synthetic construct
  source 1..25: mol_type = other DNA
  modified_base 2: mod_base = OTHER; note = 2'-O-methyl modified nucleotide
  modified_base 4: mod_base = OTHER; note = 2'-O-methyl modified nucleotide
  modified_base 14: mod_base = OTHER; note = 2'-O-methyl modified nucleotide
  modified_base 16: mod_base = OTHER; note = 2'-O-methyl modified nucleotide
  misc_feature 1..24: note = RNA
  misc_feature 25: note = DNA
gttcagaagttgttagtgaattgct

SEQ ID NO: 1035 - DNA, 25 bp, synthetic construct
  source 1..25: mol_type = other DNA
  modified_base 2: mod_base = OTHER; note = 2'-O-methyl modified nucleotide
  modified_base 4: mod_base = OTHER; note = 2'-O-methyl modified nucleotide
  modified_base 14: mod_base = OTHER; note = 2'-O-methyl modified nucleotide
  modified_base 16: mod_base = OTHER; note = 2'-O-methyl modified nucleotide
  misc_feature 1..23: note = RNA
  misc_feature 24: note = DNA
  misc_feature 25: note = RNA
ttcagaagttgttagtgatatgcta

SEQ ID NO: 1036 - DNA, 25 bp, synthetic construct
  source 1..25: mol_type = other DNA
  modified_base 2: mod_base = OTHER; note = 2'-O-methyl modified nucleotide
  modified_base 4: mod_base = OTHER; note = 2'-O-methyl modified nucleotide
  modified_base 14: mod_base = OTHER; note = 2'-O-methyl modified nucleotide
  modified_base 16: mod_base = OTHER; note = 2'-O-methyl modified nucleotide
  misc_feature 1..24: note = RNA
  misc_feature 25: note = DNA
tcagaagttgttagtgattagctat

SEQ ID NO: 1037 - DNA, 25 bp, synthetic construct
  source 1..25: mol_type = other DNA
  modified_base 2: mod_base = OTHER; note = 2'-O-methyl modified nucleotide
  modified_base 4: mod_base = OTHER; note = 2'-O-methyl modified nucleotide
  modified_base 14: mod_base = OTHER; note = 2'-O-methyl modified nucleotide
  modified_base 16: mod_base = OTHER; note = 2'-O-methyl modified nucleotide
  misc_feature 1..23: note = RNA
  misc_feature 24: note = DNA
  misc_feature 25: note = RNA
cagaagttgttagtgatttactatc

SEQ ID NO: 1038 - RNA, 25 nt, synthetic construct
  source 1..25: mol_type = other RNA
  modified_base 2: mod_base = OTHER; note = 2'-O-methyl modified nucleotide
  modified_base 4: mod_base = OTHER; note = 2'-O-methyl modified nucleotide
  modified_base 14: mod_base = OTHER; note = 2'-O-methyl modified nucleotide
  modified_base 16: mod_base = OTHER; note = 2'-O-methyl modified nucleotide
agaagttgttagtgatttgatatca

SEQ ID NO: 1039 - DNA, 25 bp, synthetic construct
  source 1..25: mol_type = other DNA
  modified_base 2: mod_base = OTHER; note = 2'-O-methyl modified nucleotide
  modified_base 4: mod_base = OTHER; note = 2'-O-methyl modified nucleotide
  modified_base 14: mod_base = OTHER; note = 2'-O-methyl modified nucleotide
  modified_base 16: mod_base = OTHER; note = 2'-O-methyl modified nucleotide
  misc_feature 1..24: note = RNA
  misc_feature 25: note = DNA
gaagttgttagtgatttgcaatcat

SEQ ID NO: 1040 - DNA, 25 bp, synthetic construct
  source 1..25: mol_type = other DNA
  modified_base 2: mod_base = OTHER; note = 2'-O-methyl modified nucleotide
  modified_base 4: mod_base = OTHER; note = 2'-O-methyl modified nucleotide
  modified_base 14: mod_base = OTHER; note = 2'-O-methyl modified nucleotide
  modified_base 16: mod_base = OTHER; note = 2'-O-methyl modified nucleotide
  misc_feature 1..23: note = RNA
  misc_feature 24: note = DNA
  misc_feature 25: note = RNA
aagttgttagtgatttgctatcata

SEQ ID NO: 1041 - DNA, 25 bp, synthetic construct
  source 1..25: mol_type = other DNA
  modified_base 2: mod_base = OTHER; note = 2'-O-methyl modified nucleotide
  modified_base 4: mod_base = OTHER; note = 2'-O-methyl modified nucleotide
  modified_base 14: mod_base = OTHER; note = 2'-O-methyl modified nucleotide
  modified_base 16: mod_base = OTHER; note = 2'-O-methyl modified nucleotide
  misc_feature 1..24: note = RNA
  misc_feature 25: note = DNA
agttgttagtgatttgctaacatat

SEQ ID NO: 1042 - DNA, 25 bp, synthetic construct
  source 1..25: mol_type = other DNA
  modified_base 2: mod_base = OTHER; note = 2'-O-methyl modified nucleotide
  modified_base 4: mod_base = OTHER; note = 2'-O-methyl modified nucleotide
  modified_base 14: mod_base = OTHER; note = 2'-O-methyl modified nucleotide
  modified_base 16: mod_base = OTHER; note = 2'-O-methyl modified nucleotide
  misc_feature 1..23: note = RNA
  misc_feature 24: note = DNA
  misc_feature 25: note = RNA
gttgttagtgatttgctataatata

SEQ ID NO: 1043 - DNA, 25 bp, synthetic construct
  source 1..25: mol_type = other DNA
  modified_base 2: mod_base = OTHER; note = 2'-O-methyl modified nucleotide
  modified_base 4: mod_base = OTHER; note = 2'-O-methyl modified nucleotide
  modified_base 14: mod_base = OTHER; note = 2'-O-methyl modified nucleotide
  modified_base 16: mod_base = OTHER; note = 2'-O-methyl modified nucleotide
  misc_feature 1..24: note = RNA
  misc_feature 25: note = DNA
ttgttagtgatttgctatcatatat

SEQ ID NO: 1044 - DNA, 25 bp, synthetic construct
  source 1..25: mol_type = other DNA
  modified_base 2: mod_base = OTHER; note = 2'-O-methyl modified nucleotide
  modified_base 4: mod_base = OTHER; note = 2'-O-methyl modified nucleotide
  modified_base 14: mod_base = OTHER; note = 2'-O-methyl modified nucleotide
  modified_base 16: mod_base = OTHER; note = 2'-O-methyl modified nucleotide
  misc_feature 1..23: note = RNA
  misc_feature 24..25: note = DNA
attataagatttttaggtgactttt

SEQ ID NO: 1045 - DNA, 25 bp, synthetic construct
  source 1..25: mol_type = other DNA
  modified_base 2: mod_base = OTHER; note = 2'-O-methyl modified nucleotide
  modified_base 4: mod_base = OTHER; note = 2'-O-methyl modified nucleotide
  modified_base 14: mod_base = OTHER; note = 2'-O-methyl modified nucleotide
  modified_base 16: mod_base = OTHER; note = 2'-O-methyl modified nucleotide
  misc_feature 1..23: note = RNA
  misc_feature 24: note = DNA
  misc_feature 25: note = RNA
ttataagatttttaggtgtatttta

SEQ ID NO: 1046 - RNA, 25 nt, synthetic construct
  source 1..25: mol_type = other RNA
  modified_base 2: mod_base = OTHER; note = 2'-O-methyl modified nucleotide
  modified_base 4: mod_base = OTHER; note = 2'-O-methyl modified nucleotide
  modified_base 14: mod_base = OTHER; note = 2'-O-methyl modified nucleotide
  modified_base 16: mod_base = OTHER; note = 2'-O-methyl modified nucleotide
tataagatttttaggtgtcatttaa

SEQ ID NO: 1047 - DNA, 25 bp, synthetic construct
  source 1..25: mol_type = other DNA
  modified_base 2: mod_base = OTHER; note = 2'-O-methyl modified nucleotide
  modified_base 4: mod_base = OTHER; note = 2'-O-methyl modified nucleotide
  modified_base 14: mod_base = OTHER; note = 2'-O-methyl modified nucleotide
  modified_base 16: mod_base = OTHER; note = 2'-O-methyl modified nucleotide
  misc_feature 1..24: note = RNA
  misc_feature 25: note = DNA
ataagatttttaggtgtctattaat

SEQ ID NO: 1048 - DNA, 25 bp, synthetic construct
  source 1..25: mol_type = other DNA
  modified_base 2: mod_base = OTHER; note = 2'-O-methyl modified nucleotide
  modified_base 4: mod_base = OTHER; note = 2'-O-methyl modified nucleotide
  modified_base 14: mod_base = OTHER; note = 2'-O-methyl modified nucleotide
  modified_base 16: mod_base = OTHER; note = 2'-O-methyl modified nucleotide
  misc_feature 1..23: note = RNA
  misc_feature 24: note = DNA
  misc_feature 25: note = RNA
taagatttttaggtgtcttataatg

SEQ ID NO: 1049 - RNA, 25 nt, synthetic construct
  source 1..25: mol_type = other RNA
  modified_base 2: mod_base = OTHER; note = 2'-O-methyl modified nucleotide
  modified_base 4: mod_base = OTHER; note = 2'-O-methyl modified nucleotide
  modified_base 14: mod_base = OTHER; note = 2'-O-methyl modified nucleotide
  modified_base 16: mod_base = OTHER; note = 2'-O-methyl modified nucleotide
aagatttttaggtgtctttaaatga

SEQ ID NO: 1050 - DNA, 25 bp, synthetic construct
  source 1..25: mol_type = other DNA
  modified_base 2: mod_base = OTHER; note = 2'-O-methyl modified nucleotide
  modified_base 4: mod_base = OTHER; note = 2'-O-methyl modified nucleotide
  modified_base 14: mod_base = OTHER; note = 2'-O-methyl modified nucleotide
  modified_base 16: mod_base = OTHER; note = 2'-O-methyl modified nucleotide
  misc_feature 1..24: note = RNA
  misc_feature 25: note = DNA
agatttttaggtgtcttttaatgat

SEQ ID NO: 1051 - DNA, 25 bp, synthetic construct
  source 1..25: mol_type = other DNA
  modified_base 2: mod_base = OTHER; note = 2'-O-methyl modified nucleotide
  modified_base 4: mod_base = OTHER; note = 2'-O-methyl modified nucleotide
  modified_base 14: mod_base = OTHER; note = 2'-O-methyl modified nucleotide
  modified_base 16: mod_base = OTHER; note = 2'-O-methyl modified nucleotide
  misc_feature 1..23: note = RNA
  misc_feature 24: note = DNA
  misc_feature 25: note = RNA
gatttttaggtgtcttttaatgata

SEQ ID NO: 1052 - RNA, 25 nt, synthetic construct
  source 1..25: mol_type = other RNA
  modified_base 2: mod_base = OTHER; note = 2'-O-methyl modified nucleotide
  modified_base 4: mod_base = OTHER; note = 2'-O-methyl modified nucleotide
  modified_base 14: mod_base = OTHER; note = 2'-O-methyl modified nucleotide
  modified_base 16: mod_base = OTHER; note = 2'-O-methyl modified nucleotide
atttttaggtgtcttttaaagatac

SEQ ID NO: 1053 - DNA, 25 bp, synthetic construct
  source 1..25: mol_type = other DNA
  modified_base 2: mod_base = OTHER; note = 2'-O-methyl modified nucleotide
  modified_base 4: mod_base = OTHER; note = 2'-O-methyl modified nucleotide
  modified_base 14: mod_base = OTHER; note = 2'-O-methyl modified nucleotide
  modified_base 16: mod_base = OTHER; note = 2'-O-methyl modified nucleotide
  misc_feature 1..24: note = RNA
  misc_feature 25: note = DNA
tttttaggtgtcttttaataatact

SEQ ID NO: 1054 - DNA, 25 bp, synthetic construct
  source 1..25: mol_type = other DNA
  modified_base 2: mod_base = OTHER; note = 2'-O-methyl modified nucleotide
  modified_base 4: mod_base = OTHER; note = 2'-O-methyl modified nucleotide
  modified_base 14: mod_base = OTHER; note = 2'-O-methyl modified nucleotide
  modified_base 16: mod_base = OTHER; note = 2'-O-methyl modified nucleotide
  misc_feature 1..23: note = RNA
  misc_feature 24: note = DNA
  misc_feature 25: note = RNA
ttttaggtgtcttttaatgatactg

SEQ ID NO: 1055 - DNA, 25 bp, synthetic construct
  source 1..25: mol_type = other DNA
  modified_base 2: mod_base = OTHER; note = 2'-O-methyl modified nucleotide
  modified_base 4: mod_base = OTHER; note = 2'-O-methyl modified nucleotide
  modified_base 14: mod_base = OTHER; note = 2'-O-methyl modified nucleotide
  modified_base 16: mod_base = OTHER; note = 2'-O-methyl modified nucleotide
  misc_feature 1..24: note = RNA
  misc_feature 25: note = DNA
tttaggtgtcttttaatgaaactgt

SEQ ID NO: 1056 - DNA, 25 bp, synthetic construct
  source 1..25: mol_type = other DNA
  modified_base 2: mod_base = OTHER; note = 2'-O-methyl modified nucleotide
  modified_base 4: mod_base = OTHER; note = 2'-O-methyl modified nucleotide
  modified_base 14: mod_base = OTHER; note = 2'-O-methyl modified nucleotide
  modified_base 16: mod_base = OTHER; note = 2'-O-methyl modified nucleotide
  misc_feature 1..23: note = RNA
  misc_feature 24: note = DNA
  misc_feature 25: note = RNA
ttaggtgtcttttaatgatactgtc

SEQ ID NO: 1057 - DNA, 25 bp, synthetic construct
  source 1..25: mol_type = other DNA
  modified_base 2: mod_base = OTHER; note = 2'-O-methyl modified nucleotide
  modified_base 4: mod_base = OTHER; note = 2'-O-methyl modified nucleotide
  modified_base 14: mod_base = OTHER; note = 2'-O-methyl modified nucleotide
  modified_base 16: mod_base = OTHER; note = 2'-O-methyl modified nucleotide
  misc_feature 1..24: note = RNA
  misc_feature 25: note = DNA
taggtgtcttttaatgataatgtct

SEQ ID NO: 1058 - DNA, 25 bp, synthetic construct
  source 1..25: mol_type = other DNA
  modified_base 2: mod_base = OTHER; note = 2'-O-methyl modified nucleotide
  modified_base 4: mod_base = OTHER; note = 2'-O-methyl modified nucleotide
  modified_base 14: mod_base = OTHER; note = 2'-O-methyl modified nucleotide
  modified_base 16: mod_base = OTHER; note = 2'-O-methyl modified nucleotide
  misc_feature 1..23: note = RNA
  misc_feature 24: note = DNA
  misc_feature 25: note = RNA
aggtgtcttttaatgatacagtcta

SEQ ID NO: 1059 - RNA, 25 nt, synthetic construct
  source 1..25: mol_type = other RNA
  modified_base 2: mod_base = OTHER; note = 2'-O-methyl modified nucleotide
  modified_base 4: mod_base = OTHER; note = 2'-O-methyl modified nucleotide
  modified_base 14: mod_base = OTHER; note = 2'-O-methyl modified nucleotide
  modified_base 16: mod_base = OTHER; note = 2'-O-methyl modified nucleotide
ggtgtcttttaatgatactatctaa

SEQ ID NO: 1060 - RNA, 25 nt, synthetic construct
  source 1..25: mol_type = other RNA
  modified_base 2: mod_base = OTHER; note = 2'-O-methyl modified nucleotide
  modified_base 4: mod_base = OTHER; note = 2'-O-methyl modified nucleotide
  modified_base 14: mod_base = OTHER; note = 2'-O-methyl modified nucleotide
  modified_base 16: mod_base = OTHER; note = 2'-O-methyl modified nucleotide
gtgtcttttaatgatactgactaag

SEQ ID NO: 1061 - RNA, 25 nt, synthetic construct
  source 1..25: mol_type = other RNA
  modified_base 2: mod_base = OTHER; note = 2'-O-methyl modified nucleotide
  modified_base 4: mod_base = OTHER; note = 2'-O-methyl modified nucleotide
  modified_base 14: mod_base = OTHER; note = 2'-O-methyl modified nucleotide
  modified_base 16: mod_base = OTHER; note = 2'-O-methyl modified nucleotide
tgtcttttaatgatactgtataaga

SEQ ID NO: 1062 - RNA, 25 nt, synthetic construct
  source 1..25: mol_type = other RNA
  modified_base 2: mod_base = OTHER; note = 2'-O-methyl modified nucleotide
  modified_base 4: mod_base = OTHER; note = 2'-O-methyl modified nucleotide
  modified_base 14: mod_base = OTHER; note = 2'-O-methyl modified nucleotide
  modified_base 16: mod_base = OTHER; note = 2'-O-methyl modified nucleotide
gtcttttaatgatactgtcaaagaa

SEQ ID NO: 1063 - DNA, 25 bp, synthetic construct
  source 1..25: mol_type = other DNA
  modified_base 2: mod_base = OTHER; note = 2'-O-methyl modified nucleotide
  modified_base 4: mod_base = OTHER; note = 2'-O-methyl modified nucleotide
  modified_base 14: mod_base = OTHER; note = 2'-O-methyl modified nucleotide
  modified_base 16: mod_base = OTHER; note = 2'-O-methyl modified nucleotide
  misc_feature 1..24: note = RNA
  misc_feature 25: note = DNA
tcttttaatgatactgtctaagaat

SEQ ID NO: 1064 - DNA, 25 bp, synthetic construct
  source 1..25: mol_type = other DNA
  modified_base 2: mod_base = OTHER; note = 2'-O-methyl modified nucleotide
  modified_base 4: mod_base = OTHER; note = 2'-O-methyl modified nucleotide
  modified_base 14: mod_base = OTHER; note = 2'-O-methyl modified nucleotide
  modified_base 16: mod_base = OTHER; note = 2'-O-methyl modified nucleotide
  misc_feature 1..23: note = RNA
  misc_feature 24: note = DNA
  misc_feature 25: note = RNA
cttttaatgatactgtctaagaata

SEQ ID NO: 1065 - RNA, 25 nt, synthetic construct
  source 1..25: mol_type = other RNA
  modified_base 2: mod_base = OTHER; note = 2'-O-methyl modified nucleotide
  modified_base 4: mod_base = OTHER; note = 2'-O-methyl modified nucleotide
  modified_base 14: mod_base = OTHER; note = 2'-O-methyl modified nucleotide
  modified_base 16: mod_base = OTHER; note = 2'-O-methyl modified nucleotide
ttttaatgatactgtctaaaaataa

SEQ ID NO: 1066 - DNA, 25 bp, synthetic construct
  source 1..25: mol_type = other DNA
  modified_base 2: mod_base = OTHER; note = 2'-O-methyl modified nucleotide
  modified_base 4: mod_base = OTHER; note = 2'-O-methyl modified nucleotide
  modified_base 14: mod_base = OTHER; note = 2'-O-methyl modified nucleotide
  modified_base 16: mod_base = OTHER; note = 2'-O-methyl modified nucleotide
  misc_feature 1..24: note = RNA
  misc_feature 25: note = DNA
tttaatgatactgtctaagaataat

SEQ ID NO: 1067 - DNA, 25 bp, synthetic construct
  source 1..25: mol_type = other DNA
  modified_base 2: mod_base = OTHER; note = 2'-O-methyl modified nucleotide
  modified_base 4: mod_base = OTHER; note = 2'-O-methyl modified nucleotide
  modified_base 14: mod_base = OTHER; note = 2'-O-methyl modified nucleotide
  modified_base 16: mod_base = OTHER; note = 2'-O-methyl modified nucleotide
  misc_feature 1..23: note = RNA
  misc_feature 24: note = DNA
  misc_feature 25: note = RNA
ttaatgatactgtctaagaataatg

SEQ ID NO: 1068 - RNA, 25 nt, synthetic construct
  source 1..25: mol_type = other RNA
  modified_base 2: mod_base = OTHER; note = 2'-O-methyl modified nucleotide
  modified_base 4: mod_base = OTHER; note = 2'-O-methyl modified nucleotide
  modified_base 14: mod_base = OTHER; note = 2'-O-methyl modified nucleotide
  modified_base 16: mod_base = OTHER; note = 2'-O-methyl modified nucleotide
taatgatactgtctaagaaaaatga

SEQ ID NO: 1069 - RNA, 25 nt, synthetic construct
  source 1..25: mol_type = other RNA
  modified_base 2: mod_base = OTHER; note = 2'-O-methyl modified nucleotide
  modified_base 4: mod_base = OTHER; note = 2'-O-methyl modified nucleotide
  modified_base 14: mod_base = OTHER; note = 2'-O-methyl modified nucleotide
  modified_base 16: mod_base = OTHER; note = 2'-O-methyl modified nucleotide
aatgatactgtctaagaataatgac

SEQ ID NO: 1070 - RNA, 25 nt, synthetic construct
  source 1..25: mol_type = other RNA
  modified_base 2: mod_base = OTHER; note = 2'-O-methyl modified nucleotide
  modified_base 4: mod_base = OTHER; note = 2'-O-methyl modified nucleotide
  modified_base 14: mod_base = OTHER; note = 2'-O-methyl modified nucleotide
  modified_base 16: mod_base = OTHER; note = 2'-O-methyl modified nucleotide
atgatactgtctaagaataatgacg

SEQ ID NO: 1071 - DNA, 25 bp, synthetic construct
  source 1..25: mol_type = other DNA
  modified_base 2: mod_base = OTHER; note = 2'-O-methyl modified nucleotide
  modified_base 4: mod_base = OTHER; note = 2'-O-methyl modified nucleotide
  modified_base 14: mod_base = OTHER; note = 2'-O-methyl modified nucleotide
  modified_base 16: mod_base = OTHER; note = 2'-O-methyl modified nucleotide
  misc_feature 1..24: note = RNA
  misc_feature 25: note = DNA
tgatactgtctaagaataaagacgt

SEQ ID NO: 1072 - DNA, 25 bp, synthetic construct
  source 1..25: mol_type = other DNA
  modified_base 2: mod_base = OTHER; note = 2'-O-methyl modified nucleotide
  modified_base 4: mod_base = OTHER; note = 2'-O-methyl modified nucleotide
  modified_base 14: mod_base = OTHER; note = 2'-O-methyl modified nucleotide
  modified_base 16: mod_base = OTHER; note = 2'-O-methyl modified nucleotide
  misc_feature 1..23: note = RNA
  misc_feature 24: note = DNA
  misc_feature 25: note = RNA
gatactgtctaagaataataacgta

SEQ ID NO: 1073 - DNA, 25 bp, synthetic construct
  source 1..25: mol_type = other DNA
  modified_base 2: mod_base = OTHER; note = 2'-O-methyl modified nucleotide
  modified_base 4: mod_base = OTHER; note = 2'-O-methyl modified nucleotide
  modified_base 14: mod_base = OTHER; note = 2'-O-methyl modified nucleotide
  modified_base 16: mod_base = OTHER; note = 2'-O-methyl modified nucleotide
  misc_feature 1..24: note = RNA
  misc_feature 25: note = DNA
atactgtctaagaataatgacgtat

SEQ ID NO: 1074 - DNA, 25 bp, synthetic construct
  source 1..25: mol_type = other DNA
  modified_base 2: mod_base = OTHER; note = 2'-O-methyl modified nucleotide
  modified_base 4: mod_base = OTHER; note = 2'-O-methyl modified nucleotide
  modified_base 14: mod_base = OTHER; note = 2'-O-methyl modified nucleotide
  modified_base 16: mod_base = OTHER; note = 2'-O-methyl modified nucleotide
  misc_feature 1..23: note = RNA
  misc_feature 24..25: note = DNA
tactgtctaagaataatgaagtatt

SEQ ID NO: 1075 - DNA, 25 bp, synthetic construct
  source 1..25: mol_type = other DNA
  modified_base 2: mod_base = OTHER; note = 2'-O-methyl modified nucleotide
  modified_base 4: mod_base = OTHER; note = 2'-O-methyl modified nucleotide
  modified_base 14: mod_base = OTHER; note = 2'-O-methyl modified nucleotide
  modified_base 16: mod_base = OTHER; note = 2'-O-methyl modified nucleotide
  misc_feature 1..23: note = RNA
  misc_feature 24: note = DNA
  misc_feature 25: note = RNA
gtattgtgaaatttgttaaaatata

SEQ ID NO: 1076 - DNA, 25 bp, synthetic construct
  source 1..25: mol_type = other DNA
  modified_base 2: mod_base = OTHER; note = 2'-O-methyl modified nucleotide
  modified_base 4: mod_base = OTHER; note = 2'-O-methyl modified nucleotide
  modified_base 14: mod_base = OTHER; note = 2'-O-methyl modified nucleotide
  modified_base 16: mod_base = OTHER; note = 2'-O-methyl modified nucleotide
  misc_feature 1..24: note = RNA
  misc_feature 25: note = DNA
tattgtgaaatttgttaatatatat

SEQ ID NO: 1077 - DNA, 25 bp, synthetic construct
  source 1..25: mol_type = other DNA
  modified_base 2: mod_base = OTHER; note = 2'-O-methyl modified nucleotide
  modified_base 4: mod_base = OTHER; note = 2'-O-methyl modified nucleotide
  modified_base 14: mod_base = OTHER; note = 2'-O-methyl modified nucleotide
  modified_base 16: mod_base = OTHER; note = 2'-O-methyl modified nucleotide
  misc_feature 1..23: note = RNA
  misc_feature 24: note = DNA
  misc_feature 25: note = RNA
attgtgaaatttgttaataaatata

SEQ ID NO: 1078 - DNA, 25 bp, synthetic construct
  source 1..25: mol_type = other DNA
  modified_base 2: mod_base = OTHER; note = 2'-O-methyl modified nucleotide
  modified_base 4: mod_base = OTHER; note = 2'-O-methyl modified nucleotide
  modified_base 14: mod_base = OTHER; note = 2'-O-methyl modified nucleotide
  modified_base 16: mod_base = OTHER; note = 2'-O-methyl modified nucleotide
  misc_feature 1..23: note = RNA
  misc_feature 24..25: note = DNA
aaatttgttaatatatataatactt

SEQ ID NO: 1079 - DNA, 25 bp, synthetic construct
  source 1..25: mol_type = other DNA
  modified_base 2: mod_base = OTHER; note = 2'-O-methyl modified nucleotide
  modified_base 4: mod_base = OTHER; note = 2'-O-methyl modified nucleotide
  modified_base 14: mod_base = OTHER; note = 2'-O-methyl modified nucleotide
  modified_base 16: mod_base = OTHER; note = 2'-O-methyl modified nucleotide
  misc_feature 1..23: note = RNA
  misc_feature 24: note = DNA
  misc_feature 25: note = RNA
aatttgttaatatatataaaactta

SEQ ID NO: 1080 - RNA, 25 nt, synthetic construct
  source 1..25: mol_type = other RNA
  modified_base 2: mod_base = OTHER; note = 2'-O-methyl modified nucleotide
  modified_base 4: mod_base = OTHER; note = 2'-O-methyl modified nucleotide
  modified_base 14: mod_base = OTHER; note = 2'-O-methyl modified nucleotide
  modified_base 16: mod_base = OTHER; note = 2'-O-methyl modified nucleotide
atttgttaatatatataatacttaa

SEQ ID NO: 1081 - RNA, 25 nt, synthetic construct
  source 1..25: mol_type = other RNA
  modified_base 2: mod_base = OTHER; note = 2'-O-methyl modified nucleotide
  modified_base 4: mod_base = OTHER; note = 2'-O-methyl modified nucleotide
  modified_base 14: mod_base = OTHER; note = 2'-O-methyl modified nucleotide
  modified_base 16: mod_base = OTHER; note = 2'-O-methyl modified nucleotide
tttgttaatatatataataattaaa

SEQ ID NO: 1082 - RNA, 25 nt, synthetic construct
  source 1..25: mol_type = other RNA
  modified_base 2: mod_base = OTHER; note = 2'-O-methyl modified nucleotide
  modified_base 4: mod_base = OTHER; note = 2'-O-methyl modified nucleotide
  modified_base 14: mod_base = OTHER; note = 2'-O-methyl modified nucleotide
  modified_base 16: mod_base = OTHER; note = 2'-O-methyl modified nucleotide
ttgttaatatatataatacataaaa

SEQ ID NO: 1083 - RNA, 25 nt, synthetic construct
  source 1..25: mol_type = other RNA
  modified_base 2: mod_base = OTHER; note = 2'-O-methyl modified nucleotide
  modified_base 4: mod_base = OTHER; note = 2'-O-methyl modified nucleotide
  modified_base 14: mod_base = OTHER; note = 2'-O-methyl modified nucleotide
  modified_base 16: mod_base = OTHER; note = 2'-O-methyl modified nucleotide
tgttaatatatataatactaaaaaa

SEQ ID NO: 1084 - DNA, 25 bp, synthetic construct
  source 1..25: mol_type = other DNA
  modified_base 2: mod_base = OTHER; note = 2'-O-methyl modified nucleotide
  modified_base 4: mod_base = OTHER; note = 2'-O-methyl modified nucleotide
  modified_base 14: mod_base = OTHER; note = 2'-O-methyl modified nucleotide
  modified_base 16: mod_base = OTHER; note = 2'-O-methyl modified nucleotide
  misc_feature 1..24: note = RNA
  misc_feature 25: note = DNA
gttaatatatataatacttaaaaat

SEQ ID NO: 1085 - DNA, 25 bp, synthetic construct
  source 1..25: mol_type = other DNA
  modified_base 2: mod_base = OTHER; note = 2'-O-methyl modified nucleotide
  modified_base 4: mod_base = OTHER; note = 2'-O-methyl modified nucleotide
  modified_base 14: mod_base = OTHER; note = 2'-O-methyl modified nucleotide
  modified_base 16: mod_base = OTHER; note = 2'-O-methyl modified nucleotide
  misc_feature 1..23: note = RNA
  misc_feature 24: note = DNA
  misc_feature 25: note = RNA
ttaatatatataatacttaaaaata

SEQ ID NO: 1086 - DNA, 25 bp, synthetic construct
  source 1..25: mol_type = other DNA
  modified_base 2: mod_base = OTHER; note = 2'-O-methyl modified nucleotide
  modified_base 4: mod_base = OTHER; note = 2'-O-methyl modified nucleotide
  modified_base 14: mod_base = OTHER; note = 2'-O-methyl modified nucleotide
  modified_base 16: mod_base = OTHER; note = 2'-O-methyl modified nucleotide
  misc_feature 1..24: note = RNA
  misc_feature 25: note = DNA
tatgtgagcatgaaactatacacct

SEQ ID NO: 1087 - DNA, 25 bp, synthetic construct
  source 1..25: mol_type = other DNA
  modified_base 2: mod_base = OTHER; note = 2'-O-methyl modified nucleotide
  modified_base 4: mod_base = OTHER; note = 2'-O-methyl modified nucleotide
  modified_base 14: mod_base = OTHER; note = 2'-O-methyl modified nucleotide
  modified_base 16: mod_base = OTHER; note = 2'-O-methyl modified nucleotide
  misc_feature 1..23: note = RNA
  misc_feature 24: note = DNA
  misc_feature 25: note = RNA
atgtgagcatgaaactatgaaccta

SEQ ID NO: 1088 - DNA, 25 bp, synthetic construct
  source 1..25: mol_type = other DNA
  modified_base 2: mod_base = OTHER; note = 2'-O-methyl modified nucleotide
  modified_base 4: mod_base = OTHER; note = 2'-O-methyl modified nucleotide
  modified_base 14: mod_base = OTHER; note = 2'-O-methyl modified nucleotide
  modified_base 16: mod_base = OTHER; note = 2'-O-methyl modified nucleotide
  misc_feature 1..23: note = RNA
  misc_feature 24: note = DNA
  misc_feature 25: note = RNA
gtgagcatgaaactatgcaactata

SEQ ID NO: 1089 - RNA, 25 nt, synthetic construct
  source 1..25: mol_type = other RNA
  modified_base 2: mod_base = OTHER; note = 2'-O-methyl modified nucleotide
  modified_base 4: mod_base = OTHER; note = 2'-O-methyl modified nucleotide
  modified_base 14: mod_base = OTHER; note = 2'-O-methyl modified nucleotide
  modified_base 16: mod_base = OTHER; note = 2'-O-methyl modified nucleotide
tgagcatgaaactatgcacatataa

SEQ ID NO: 1090 - RNA, 25 nt, synthetic construct
  source 1..25: mol_type = other RNA
  modified_base 2: mod_base = OTHER; note = 2'-O-methyl modified nucleotide
  modified_base 4: mod_base = OTHER; note = 2'-O-methyl modified nucleotide
  modified_base 14: mod_base = OTHER; note = 2'-O-methyl modified nucleotide
  modified_base 16: mod_base = OTHER; note = 2'-O-methyl modified nucleotide
gagcatgaaactatgcaccaataaa

SEQ ID NO: 1091 - DNA, 25 bp, synthetic construct
  source 1..25: mol_type = other DNA
  modified_base 2: mod_base = OTHER; note = 2'-O-methyl modified nucleotide
  modified_base 4: mod_base = OTHER; note = 2'-O-methyl modified nucleotide
  modified_base 14: mod_base = OTHER; note = 2'-O-methyl modified nucleotide
  modified_base 16: mod_base = OTHER; note = 2'-O-methyl modified nucleotide
  misc_feature 1..24: note = RNA
  misc_feature 25: note = DNA
agcatgaaactatgcacctataaat

SEQ ID NO: 1092 - DNA, 25 bp, synthetic construct
  source 1..25: mol_type = other DNA
  modified_base 2: mod_base = OTHER; note = 2'-O-methyl modified nucleotide
  modified_base 4: mod_base = OTHER; note = 2'-O-methyl modified nucleotide
  modified_base 14: mod_base = OTHER; note = 2'-O-methyl modified nucleotide
  modified_base 16: mod_base = OTHER; note = 2'-O-methyl modified nucleotide
  misc_feature 1..23: note = RNA
  misc_feature 24: note = DNA
  misc_feature 25: note = RNA
gcatgaaactatgcacctaaaaata

SEQ ID NO: 1093 - RNA, 25 nt, synthetic construct
  source 1..25: mol_type = other RNA
  modified_base 2: mod_base = OTHER; note = 2'-O-methyl modified nucleotide
  modified_base 4: mod_base = OTHER; note = 2'-O-methyl modified nucleotide
  modified_base 14: mod_base = OTHER; note = 2'-O-methyl modified nucleotide
  modified_base 16: mod_base = OTHER; note = 2'-O-methyl modified nucleotide
catgaaactatgcacctataaatac

SEQ ID NO: 1094 - DNA, 25 bp, synthetic construct
  source 1..25: mol_type = other DNA
  modified_base 2: mod_base = OTHER; note = 2'-O-methyl modified nucleotide
  modified_base 4: mod_base = OTHER; note = 2'-O-methyl modified nucleotide
  modified_base 14: mod_base = OTHER; note = 2'-O-methyl modified nucleotide
  modified_base 16: mod_base = OTHER; note = 2'-O-methyl modified nucleotide
  misc_feature 1..24: note = RNA
  misc_feature 25: note = DNA
atgaaactatgcacctataaatact

SEQ ID NO: 1095 - DNA, 25 bp, synthetic construct
  source 1..25: mol_type = other DNA
  modified_base 2: mod_base = OTHER; note = 2'-O-methyl modified nucleotide
  modified_base 4: mod_base = OTHER; note = 2'-O-methyl modified nucleotide
  modified_base 14: mod_base = OTHER; note = 2'-O-methyl modified nucleotide
  modified_base 16: mod_base = OTHER; note = 2'-O-methyl modified nucleotide
  misc_feature 1..23: note = RNA
  misc_feature 24: note = DNA
  misc_feature 25: note = RNA
tgaaactatgcacctataaatacta

SEQ ID NO: 1096 - RNA, 25 nt, synthetic construct
  source 1..25: mol_type = other RNA
  modified_base 2: mod_base = OTHER; note = 2'-O-methyl modified nucleotide
  modified_base 4: mod_base = OTHER; note = 2'-O-methyl modified nucleotide
  modified_base 14: mod_base = OTHER; note = 2'-O-methyl modified nucleotide
  modified_base 16: mod_base = OTHER; note = 2'-O-methyl modified nucleotide
gaaactatgcacctataaaaactaa

SEQ ID NO: 1097 - RNA, 25 nt, synthetic construct
  source 1..25: mol_type = other RNA
  modified_base 2: mod_base = OTHER; note = 2'-O-methyl modified nucleotide
  modified_base 4: mod_base = OTHER; note = 2'-O-methyl modified nucleotide
  modified_base 14: mod_base = OTHER; note = 2'-O-methyl modified nucleotide
  modified_base 16: mod_base = OTHER; note = 2'-O-methyl modified nucleotide
aaactatgcacctataaatactaaa

SEQ ID NO: 1098 - DNA, 25 bp, synthetic construct
  source 1..25: mol_type = other DNA
  modified_base 2: mod_base = OTHER; note = 2'-O-methyl modified nucleotide
  modified_base 4: mod_base = OTHER; note = 2'-O-methyl modified nucleotide
  modified_base 14: mod_base = OTHER; note = 2'-O-methyl modified nucleotide
  modified_base 16: mod_base = OTHER; note = 2'-O-methyl modified nucleotide
  misc_feature 1..24: note = RNA
  misc_feature 25: note = DNA
aactatgcacctataaataataaat

SEQ ID NO: 1099 - DNA, 25 bp, synthetic construct
  source 1..25: mol_type = other DNA
  modified_base 2: mod_base = OTHER; note = 2'-O-methyl modified nucleotide
  modified_base 4: mod_base = OTHER; note = 2'-O-methyl modified nucleotide
  modified_base 14: mod_base = OTHER; note = 2'-O-methyl modified nucleotide
  modified_base 16: mod_base = OTHER; note = 2'-O-methyl modified nucleotide
  misc_feature 1..23: note = RNA
  misc_feature 24: note = DNA
  misc_feature 25: note = RNA
actatgcacctataaatacaaaata

SEQ ID NO: 1100 - DNA, 25 bp, synthetic construct
  source 1..25: mol_type = other DNA
  modified_base 2: mod_base = OTHER; note = 2'-O-methyl modified nucleotide
  modified_base 4: mod_base = OTHER; note = 2'-O-methyl modified nucleotide
  modified_base 14: mod_base = OTHER; note = 2'-O-methyl modified nucleotide
  modified_base 16: mod_base = OTHER; note = 2'-O-methyl modified nucleotide
  misc_feature 1..24: note = RNA
  misc_feature 25: note = DNA
ctatgcacctataaatactaaatat

SEQ ID NO: 1101 - DNA, 25 bp, synthetic construct
  source 1..25: mol_type = other DNA
  modified_base 2: mod_base = OTHER; note = 2'-O-methyl modified nucleotide
  modified_base 4: mod_base = OTHER; note = 2'-O-methyl modified nucleotide
  modified_base 14: mod_base = OTHER; note = 2'-O-methyl modified nucleotide
  modified_base 16: mod_base = OTHER; note = 2'-O-methyl modified nucleotide
  misc_feature 1..23: note = RNA
  misc_feature 24: note = DNA
  misc_feature 25: note = RNA
tatgcacctataaatactaaatatg

SEQ ID NO: 1102 - RNA, 25 nt, synthetic construct
  source 1..25: mol_type = other RNA
  modified_base 2: mod_base = OTHER; note = 2'-O-methyl modified nucleotide
  modified_base 4: mod_base = OTHER; note = 2'-O-methyl modified nucleotide
  modified_base 14: mod_base = OTHER; note = 2'-O-methyl modified nucleotide
  modified_base 16: mod_base = OTHER; note = 2'-O-methyl modified nucleotide
atgcacctataaatactaaatatga

SEQ ID NO: 1103 - DNA, 25 bp, synthetic construct
  source 1..25: mol_type = other DNA
  modified_base 2: mod_base = OTHER; note = 2'-O-methyl modified nucleotide
  modified_base 4: mod_base = OTHER; note = 2'-O-methyl modified nucleotide
  modified_base 14: mod_base = OTHER; note = 2'-O-methyl modified nucleotide
  modified_base 16: mod_base = OTHER; note = 2'-O-methyl modified nucleotide
  misc_feature 1..23: note = RNA
  misc_feature 24: note = DNA
  misc_feature 25: note = RNA
gtttgtatataaatggtgaaaatta

SEQ ID NO: 1104 - RNA, 25 nt, synthetic construct
  source 1..25: mol_type = other RNA
  modified_base 2: mod_base = OTHER; note = 2'-O-methyl modified nucleotide
  modified_base 4: mod_base = OTHER; note = 2'-O-methyl modified nucleotide
  modified_base 14: mod_base = OTHER; note = 2'-O-methyl modified nucleotide
  modified_base 16: mod_base = OTHER; note = 2'-O-methyl modified nucleotide
tttgtatataaatggtgagaattaa

SEQ ID NO: 1105 - RNA, 25 nt, synthetic construct
  source 1..25: mol_type = other RNA
  modified_base 2: mod_base = OTHER; note = 2'-O-methyl modified nucleotide
  modified_base 4: mod_base = OTHER; note = 2'-O-methyl modified nucleotide
  modified_base 14: mod_base = OTHER; note = 2'-O-methyl modified nucleotide
  modified_base 16: mod_base = OTHER; note = 2'-O-methyl modified nucleotide
ttgtatataaatggtgagaattaaa

SEQ ID NO: 1106 - RNA, 25 nt, synthetic construct
  source 1..25: mol_type = other RNA
  modified_base 2: mod_base = OTHER; note = 2'-O-methyl modified nucleotide
  modified_base 4: mod_base = OTHER; note = 2'-O-methyl modified nucleotide
  modified_base 14: mod_base = OTHER; note = 2'-O-methyl modified nucleotide
  modified_base 16: mod_base = OTHER; note = 2'-O-methyl modified nucleotide
tgtatataaatggtgagaaataaaa

SEQ ID NO: 1107 - DNA, 25 bp, synthetic construct
  source 1..25: mol_type = other DNA
  modified_base 2: mod_base = OTHER; note = 2'-O-methyl modified nucleotide
  modified_base 4: mod_base = OTHER; note = 2'-O-methyl modified nucleotide
  modified_base 14: mod_base = OTHER; note = 2'-O-methyl modified nucleotide
  modified_base 16: mod_base = OTHER; note = 2'-O-methyl modified nucleotide
  misc_feature 1..24: note = RNA
  misc_feature 25: note = DNA
gtatataaatggtgagaataaaaat

SEQ ID NO: 1108 - DNA, 25 bp, synthetic construct
  source 1..25: mol_type = other DNA
  modified_base 2: mod_base = OTHER; note = 2'-O-methyl modified nucleotide
  modified_base 4: mod_base = OTHER; note = 2'-O-methyl modified nucleotide
  modified_base 14: mod_base = OTHER; note = 2'-O-methyl modified nucleotide
  modified_base 16: mod_base = OTHER; note = 2'-O-methyl modified nucleotide
  misc_feature 1..23: note = RNA
  misc_feature 24: note = DNA
  misc_feature 25: note = RNA
tatataaatggtgagaattaaaata

SEQ ID NO: 1109 - RNA, 25 nt, synthetic construct
  source 1..25: mol_type = other RNA
  modified_base 2: mod_base = OTHER; note = 2'-O-methyl modified nucleotide
  modified_base 4: mod_base = OTHER; note = 2'-O-methyl modified nucleotide
  modified_base 14: mod_base = OTHER; note = 2'-O-methyl modified nucleotide
  modified_base 16: mod_base = OTHER; note = 2'-O-methyl modified nucleotide
atataaatggtgagaattaaaataa

SEQ ID NO: 1110 - RNA, 25 nt, synthetic construct
  source 1..25: mol_type = other RNA
  modified_base 2: mod_base = OTHER; note = 2'-O-methyl modified nucleotide
  modified_base 4: mod_base = OTHER; note = 2'-O-methyl modified nucleotide
  modified_base 14: mod_base = OTHER; note = 2'-O-methyl modified nucleotide
  modified_base 16: mod_base = OTHER; note = 2'-O-methyl modified nucleotide
tataaatggtgagaattaaaataaa

SEQ ID NO: 1111 - RNA, 25 nt, synthetic construct
  source 1..25: mol_type = other RNA
  modified_base 2: mod_base = OTHER; note = 2'-O-methyl modified nucleotide
  modified_base 4: mod_base = OTHER; note = 2'-O-methyl modified nucleotide
  modified_base 14: mod_base = OTHER; note = 2'-O-methyl modified nucleotide
  modified_base 16: mod_base = OTHER; note = 2'-O-methyl modified nucleotide
ataaatggtgagaattaaaataaaa

SEQ ID NO: 1112 - RNA, 25 nt, synthetic construct
  source 1..25: mol_type = other RNA
  modified_base 2: mod_base = OTHER; note = 2'-O-methyl modified nucleotide
  modified_base 4: mod_base = OTHER; note = 2'-O-methyl modified nucleotide
  modified_base 14: mod_base = OTHER; note = 2'-O-methyl modified nucleotide
  modified_base 16: mod_base = OTHER; note = 2'-O-methyl modified nucleotide
taaatggtgagaattaaaaaaaaac

SEQ ID NO: 1113 - RNA, 25 nt, synthetic construct
  source 1..25: mol_type = other RNA
  modified_base 2: mod_base = OTHER; note = 2'-O-methyl modified nucleotide
  modified_base 4: mod_base = OTHER; note = 2'-O-methyl modified nucleotide
  modified_base 14: mod_base = OTHER; note = 2'-O-methyl modified nucleotide
  modified_base 16: mod_base = OTHER; note = 2'-O-methyl modified nucleotide
aaatggtgagaattaaaataaaacg

SEQ ID NO: 1114 - DNA, 25 bp, synthetic construct
  source 1..25: mol_type = other DNA
  modified_base 2: mod_base = OTHER; note = 2'-O-methyl modified nucleotide
  modified_base 4: mod_base = OTHER; note = 2'-O-methyl modified nucleotide
  modified_base 14: mod_base = OTHER; note = 2'-O-methyl modified nucleotide
  modified_base 16: mod_base = OTHER; note = 2'-O-methyl modified nucleotide
  misc_feature 1..24: note = RNA
  misc_feature 25: note = DNA
aatggtgagaattaaaataaaacgt

SEQ ID NO: 1115 - DNA, 25 bp, synthetic construct
  source 1..25: mol_type = other DNA
  modified_base 2: mod_base = OTHER; note = 2'-O-methyl modified nucleotide
  modified_base 4: mod_base = OTHER; note = 2'-O-methyl modified nucleotide
  modified_base 14: mod_base = OTHER; note = 2'-O-methyl modified nucleotide
  modified_base 16: mod_base = OTHER; note = 2'-O-methyl modified nucleotide
  misc_feature 1..23: note = RNA
  misc_feature 24..25: note = DNA
atggtgagaattaaaataaaacgtt

SEQ ID NO: 1116 - DNA, 25 bp, synthetic construct
  source 1..25: mol_type = other DNA
  modified_base 2: mod_base = OTHER; note = 2'-O-methyl modified nucleotide
  modified_base 4: mod_base = OTHER; note = 2'-O-methyl modified nucleotide
  modified_base 14: mod_base = OTHER; note = 2'-O-methyl modified nucleotide
  modified_base 16: mod_base = OTHER; note = 2'-O-methyl modified nucleotide
  misc_feature 1..23: note = RNA
  misc_feature 24: note = DNA
  misc_feature 25: note = RNA
tggtgagaattaaaataaaacgtta

SEQ ID NO: 1117 - DNA, 25 bp, synthetic construct
  source 1..25: mol_type = other DNA
  modified_base 2: mod_base = OTHER; note = 2'-O-methyl modified nucleotide
  modified_base 4: mod_base = OTHER; note = 2'-O-methyl modified nucleotide
  modified_base 14: mod_base = OTHER; note = 2'-O-methyl modified nucleotide
  modified_base 16: mod_base = OTHER; note = 2'-O-methyl modified nucleotide
  misc_feature 1..24: note = RNA
  misc_feature 25: note = DNA
ggtgagaattaaaataaaaagttat

SEQ ID NO: 1118 - RNA, 25 nt, synthetic construct
  source 1..25: mol_type = other RNA
  modified_base 2: mod_base = OTHER; note = 2'-O-methyl modified nucleotide
  modified_base 4: mod_base = OTHER; note = 2'-O-methyl modified nucleotide
  modified_base 14: mod_base = OTHER; note = 2'-O-methyl modified nucleotide
  modified_base 16: mod_base = OTHER; note = 2'-O-methyl modified nucleotide
ttatttttatcccatctcaatttaa

SEQ ID NO: 1119 - DNA, 25 bp, synthetic construct
  source 1..25: mol_type = other DNA
  modified_base 2: mod_base = OTHER; note = 2'-O-methyl modified nucleotide
  modified_base 4: mod_base = OTHER; note = 2'-O-methyl modified nucleotide
  modified_base 14: mod_base = OTHER; note = 2'-O-methyl modified nucleotide
  modified_base 16: mod_base = OTHER; note = 2'-O-methyl modified nucleotide
  misc_feature 1..23: note = RNA
  misc_feature 24: note = DNA
  misc_feature 25: note = RNA
atttttatcccatctcactataata

SEQ ID NO: 1120 - RNA, 25 nt, synthetic construct
  source 1..25: mol_type = other RNA
  modified_base 2: mod_base = OTHER; note = 2'-O-methyl modified nucleotide
  modified_base 4: mod_base = OTHER; note = 2'-O-methyl modified nucleotide
  modified_base 14: mod_base = OTHER; note = 2'-O-methyl modified nucleotide
  modified_base 16: mod_base = OTHER; note = 2'-O-methyl modified nucleotide
tttttatcccatctcacttaaataa

SEQ ID NO: 1121 - DNA, 25 bp, synthetic construct
  source 1..25: mol_type = other DNA
  modified_base 2: mod_base = OTHER; note = 2'-O-methyl modified nucleotide
  modified_base 4: mod_base = OTHER; note = 2'-O-methyl modified nucleotide
  modified_base 14: mod_base = OTHER; note = 2'-O-methyl modified nucleotide
  modified_base 16: mod_base = OTHER; note = 2'-O-methyl modified nucleotide
  misc_feature 1..24: note = RNA
  misc_feature 25: note = DNA
ttttatcccatctcactttaataat

SEQ ID NO: 1122 - DNA, 25 bp, synthetic construct
  source 1..25: mol_type = other DNA
  modified_base 2: mod_base = OTHER; note = 2'-O-methyl modified nucleotide
  modified_base 4: mod_base = OTHER; note = 2'-O-methyl modified nucleotide
  modified_base 14: mod_base = OTHER; note = 2'-O-methyl modified nucleotide
  modified_base 16: mod_base = OTHER; note = 2'-O-methyl modified nucleotide
  misc_feature 1..23: note = RNA
  misc_feature 24: note = DNA
  misc_feature 25: note = RNA
tttatcccatctcactttaataata

SEQ ID NO: 1123 - RNA, 25 nt, synthetic construct
  source 1..25: mol_type = other RNA
  modified_base 2: mod_base = OTHER; note = 2'-O-methyl modified nucleotide
  modified_base 4: mod_base = OTHER; note = 2'-O-methyl modified nucleotide
  modified_base 14: mod_base = OTHER; note = 2'-O-methyl modified nucleotide
  modified_base 16: mod_base = OTHER; note = 2'-O-methyl modified nucleotide
ttatcccatctcactttaaaaataa

SEQ ID NO: 1124 - RNA, 25 nt, synthetic construct
  source 1..25: mol_type = other RNA
  modified_base 2: mod_base = OTHER; note = 2'-O-methyl modified nucleotide
  modified_base 4: mod_base = OTHER; note = 2'-O-methyl modified nucleotide
  modified_base 14: mod_base = OTHER; note = 2'-O-methyl modified nucleotide
  modified_base 16: mod_base = OTHER; note = 2'-O-methyl modified nucleotide
tatcccatctcactttaataataaa

SEQ ID NO: 1125 - RNA, 25 nt, synthetic construct
  source 1..25: mol_type = other RNA
  modified_base 2: mod_base = OTHER; note = 2'-O-methyl modified nucleotide
  modified_base 4: mod_base = OTHER; note = 2'-O-methyl modified nucleotide
  modified_base 14: mod_base = OTHER; note = 2'-O-methyl modified nucleotide
  modified_base 16: mod_base = OTHER; note = 2'-O-methyl modified nucleotide
atcccatctcactttaataataaaa

SEQ ID NO: 1126 - RNA, 25 nt, synthetic construct
  source 1..25: mol_type = other RNA
  modified_base 2: mod_base = OTHER; note = 2'-O-methyl modified nucleotide
  modified_base 4: mod_base = OTHER; note = 2'-O-methyl modified nucleotide
  modified_base 14: mod_base = OTHER; note = 2'-O-methyl modified nucleotide
  modified_base 16: mod_base = OTHER; note = 2'-O-methyl modified nucleotide
tcccatctcactttaataaaaaaaa

SEQ ID NO: 1127 - DNA, 25 bp, synthetic construct
  source 1..25: mol_type = other DNA
  modified_base 2: mod_base = OTHER; note = 2'-O-methyl modified nucleotide
  modified_base 4: mod_base = OTHER; note = 2'-O-methyl modified nucleotide
  modified_base 14: mod_base = OTHER; note = 2'-O-methyl modified nucleotide
  modified_base 16: mod_base = OTHER; note = 2'-O-methyl modified nucleotide
  misc_feature 1..24: note = RNA
  misc_feature 25: note = DNA
cccatctcactttaataataaaaat

SEQ ID NO: 1128 - DNA, 25 bp, synthetic construct
  source 1..25: mol_type = other DNA
  modified_base 2: mod_base = OTHER; note = 2'-O-methyl modified nucleotide
  modified_base 4: mod_base = OTHER; note = 2'-O-methyl modified nucleotide
  modified_base 14: mod_base = OTHER; note = 2'-O-methyl modified nucleotide
  modified_base 16: mod_base = OTHER; note = 2'-O-methyl modified nucleotide
  misc_feature 1..23: note = RNA
  misc_feature 24: note = DNA
  misc_feature 25: note = RNA
ccatctcactttaataataaaaatc

SEQ ID NO: 1129 - RNA, 25 nt, synthetic construct
  source 1..25: mol_type = other RNA
  modified_base 2: mod_base = OTHER; note = 2'-O-methyl modified nucleotide
  modified_base 4: mod_base = OTHER; note = 2'-O-methyl modified nucleotide
  modified_base 14: mod_base = OTHER; note = 2'-O-methyl modified nucleotide
  modified_base 16: mod_base = OTHER; note = 2'-O-methyl modified nucleotide
catctcactttaataataaaaatca

SEQ ID NO: 1130 - DNA, 25 bp, synthetic construct
  source 1..25: mol_type = other DNA
  modified_base 2: mod_base = OTHER; note = 2'-O-methyl modified nucleotide
  modified_base 4: mod_base = OTHER; note = 2'-O-methyl modified nucleotide
  modified_base 14: mod_base = OTHER; note = 2'-O-methyl modified nucleotide
  modified_base 16: mod_base = OTHER; note = 2'-O-methyl modified nucleotide
  misc_feature 1..24: note = RNA
  misc_feature 25: note = DNA
atctcactttaataataaaaatcat

SEQ ID NO: 1131 - DNA, 25 bp, synthetic construct
  source 1..25: mol_type = other DNA
  modified_base 2: mod_base = OTHER; note = 2'-O-methyl modified nucleotide
  modified_base 4: mod_base = OTHER; note = 2'-O-methyl modified nucleotide
  modified_base 14: mod_base = OTHER; note = 2'-O-methyl modified nucleotide
  modified_base 16: mod_base = OTHER; note = 2'-O-methyl modified nucleotide
  misc_feature 1..23: note = RNA
  misc_feature 24: note = DNA
  misc_feature 25: note = RNA
tctcactttaataataaaaatcatg

SEQ ID NO: 1132 - RNA, 25 nt, synthetic construct
  source 1..25: mol_type = other RNA
  modified_base 2: mod_base = OTHER; note = 2'-O-methyl modified nucleotide
  modified_base 4: mod_base = OTHER; note = 2'-O-methyl modified nucleotide
  modified_base 14: mod_base = OTHER; note = 2'-O-methyl modified nucleotide
  modified_base 16: mod_base = OTHER; note = 2'-O-methyl modified nucleotide
ctcactttaataataaaaaacatgc

SEQ ID NO: 1133 - DNA, 25 bp, synthetic construct
  source 1..25: mol_type = other DNA
  modified_base 2: mod_base = OTHER; note = 2'-O-methyl modified nucleotide
  modified_base 4: mod_base = OTHER; note = 2'-O-methyl modified nucleotide
  modified_base 14: mod_base = OTHER; note = 2'-O-methyl modified nucleotide
  modified_base 16: mod_base = OTHER; note = 2'-O-methyl modified nucleotide
  misc_feature 1..24: note = RNA
  misc_feature 25: note = DNA
tcactttaataataaaaataatgct

SEQ ID NO: 1134 - DNA, 25 bp, synthetic construct
  source 1..25: mol_type = other DNA
  modified_base 2: mod_base = OTHER; note = 2'-O-methyl modified nucleotide
  modified_base 4: mod_base = OTHER; note = 2'-O-methyl modified nucleotide
  modified_base 14: mod_base = OTHER; note = 2'-O-methyl modified nucleotide
  modified_base 16: mod_base = OTHER; note = 2'-O-methyl modified nucleotide
  misc_feature 1..23: note = RNA
  misc_feature 24..25: note = DNA
cactttaataataaaaatcatgctt

SEQ ID NO: 1135 - RNA, 25 nt, synthetic construct
  source 1..25: mol_type = other RNA
  modified_base 2: mod_base = OTHER; note = 2'-O-methyl modified nucleotide
  modified_base 4: mod_base = OTHER; note = 2'-O-methyl modified nucleotide
  modified_base 14: mod_base = OTHER; note = 2'-O-methyl modified nucleotide
  modified_base 16: mod_base = OTHER; note = 2'-O-methyl modified nucleotide
atttgaagaaggaggaattatagaa

SEQ ID NO: 1136 - DNA, 25 bp, synthetic construct
  source 1..25: mol_type = other DNA
  modified_base 2: mod_base = OTHER; note = 2'-O-methyl modified nucleotide
  modified_base 4: mod_base = OTHER; note = 2'-O-methyl modified nucleotide
  modified_base 14: mod_base = OTHER; note = 2'-O-methyl modified nucleotide
  modified_base 16: mod_base = OTHER; note = 2'-O-methyl modified nucleotide
  misc_feature 1..24: note = RNA
  misc_feature 25: note = DNA
gaattttagaagaggtagaaaaaat

SEQ ID NO: 1137 - DNA, 25 bp, synthetic construct
  source 1..25: mol_type = other DNA
  modified_base 2: mod_base = OTHER; note = 2'-O-methyl modified nucleotide
  modified_base 4: mod_base = OTHER; note = 2'-O-methyl modified nucleotide
  modified_base 14: mod_base = OTHER; note = 2'-O-methyl modified nucleotide
  modified_base 16: mod_base = OTHER; note = 2'-O-methyl modified nucleotide
  misc_feature 1..24: note = RNA
  misc_feature 25: note = DNA
agaagaggtagagaaaatgaaacat

SEQ ID NO: 1138 - DNA, 25 bp, synthetic construct
  source 1..25: mol_type = other DNA
  modified_base 2: mod_base = OTHER; note = 2'-O-methyl modified nucleotide
  modified_base 4: mod_base = OTHER; note = 2'-O-methyl modified nucleotide
  modified_base 14: mod_base = OTHER; note = 2'-O-methyl modified nucleotide
  modified_base 16: mod_base = OTHER; note = 2'-O-methyl modified nucleotide
  misc_feature 1..23: note = RNA
  misc_feature 24..25: note = DNA
gaagaggtagagaaaatggaacatt

SEQ ID NO: 1139 - DNA, 25 bp, synthetic construct
  source 1..25: mol_type = other DNA
  modified_base 2: mod_base = OTHER; note = 2'-O-methyl modified nucleotide
  modified_base 4: mod_base = OTHER; note = 2'-O-methyl modified nucleotide
  modified_base 14: mod_base = OTHER; note = 2'-O-methyl modified nucleotide
  modified_base 16: mod_base = OTHER; note = 2'-O-methyl modified nucleotide
  misc_feature 1..23: note = RNA
  misc_feature 24: note = DNA
  misc_feature 25: note = RNA
aagaggtagagaaaatggaacatta

SEQ ID NO: 1140 - RNA, 25 nt, synthetic construct
  source 1..25: mol_type = other RNA
  modified_base 2: mod_base = OTHER; note = 2'-O-methyl modified nucleotide
  modified_base 4: mod_base = OTHER; note = 2'-O-methyl modified nucleotide
  modified_base 14: mod_base = OTHER; note = 2'-O-methyl modified nucleotide
  modified_base 16: mod_base = OTHER; note = 2'-O-methyl modified nucleotide
agaggtagagaaaatggaaaattaa

SEQ ID NO: 1141 - RNA, 25 nt, synthetic construct
  source 1..25: mol_type = other RNA
  modified_base 2: mod_base = OTHER; note = 2'-O-methyl modified nucleotide
  modified_base 4: mod_base = OTHER; note = 2'-O-methyl modified nucleotide
  modified_base 14: mod_base = OTHER; note = 2'-O-methyl modified nucleotide
  modified_base 16: mod_base = OTHER; note = 2'-O-methyl modified nucleotide
gaggtagagaaaatggaacattaac

SEQ ID NO: 1142 - RNA, 25 nt, synthetic construct
  source 1..25: mol_type = other RNA
  modified_base 2: mod_base = OTHER; note = 2'-O-methyl modified nucleotide
  modified_base 4: mod_base = OTHER; note = 2'-O-methyl modified nucleotide
  modified_base 14: mod_base = OTHER; note = 2'-O-methyl modified nucleotide
  modified_base 16: mod_base = OTHER; note = 2'-O-methyl modified nucleotide
aggtagagaaaatggaacaataacc

SEQ ID NO: 1143 - DNA, 25 bp, synthetic construct
  source 1..25: mol_type = other DNA
  modified_base 2: mod_base = OTHER; note = 2'-O-methyl modified nucleotide
  modified_base 4: mod_base = OTHER; note = 2'-O-methyl modified nucleotide
  modified_base 14: mod_base = OTHER; note = 2'-O-methyl modified nucleotide
  modified_base 16: mod_base = OTHER; note = 2'-O-methyl modified nucleotide
  misc_feature 1..24: note = RNA
  misc_feature 25: note = DNA
gtagagaaaatggaacattaaccct

SEQ ID NO: 1144 - DNA, 25 bp, synthetic construct
  source 1..25: mol_type = other DNA
  modified_base 2: mod_base = OTHER; note = 2'-O-methyl modified nucleotide
  modified_base 4: mod_base = OTHER; note = 2'-O-methyl modified nucleotide
  modified_base 14: mod_base = OTHER; note = 2'-O-methyl modified nucleotide
  modified_base 16: mod_base = OTHER; note = 2'-O-methyl modified nucleotide
  misc_feature 1..23: note = RNA
  misc_feature 24: note = DNA
  misc_feature 25: note = RNA
tagagaaaatggaacattaacccta

SEQ ID NO: 1145 - RNA, 25 nt, synthetic construct
  source 1..25: mol_type = other RNA
  modified_base 2: mod_base = OTHER; note = 2'-O-methyl modified nucleotide
  modified_base 4: mod_base = OTHER; note = 2'-O-methyl modified nucleotide
  modified_base 14: mod_base = OTHER; note = 2'-O-methyl modified nucleotide
  modified_base 16: mod_base = OTHER; note = 2'-O-methyl modified nucleotide
agagaaaatggaacattaaacctac

SEQ ID NO: 1146 - RNA, 25 nt, synthetic construct
  source 1..25: mol_type = other RNA
  modified_base 2: mod_base = OTHER; note = 2'-O-methyl modified nucleotide
  modified_base 4: mod_base = OTHER; note = 2'-O-methyl modified nucleotide
  modified_base 14: mod_base = OTHER; note = 2'-O-methyl modified nucleotide
  modified_base 16: mod_base = OTHER; note = 2'-O-methyl modified nucleotide
gagaaaatggaacattaacactaca

SEQ ID NO: 1147 - RNA, 25 nt, synthetic construct
  source 1..25: mol_type = other RNA
  modified_base 2: mod_base = OTHER; note = 2'-O-methyl modified nucleotide
  modified_base 4: mod_base = OTHER; note = 2'-O-methyl modified nucleotide
  modified_base 14: mod_base = OTHER; note = 2'-O-methyl modified nucleotide
  modified_base 16: mod_base = OTHER; note = 2'-O-methyl modified nucleotide
agaaaatggaacattaaccatacac

SEQ ID NO: 1148 - DNA, 25 bp, synthetic construct
  source 1..25: mol_type = other DNA
  modified_base 2: mod_base = OTHER; note = 2'-O-methyl modified nucleotide
  modified_base 4: mod_base = OTHER; note = 2'-O-methyl modified nucleotide
  modified_base 14: mod_base = OTHER; note = 2'-O-methyl modified nucleotide
  modified_base 16: mod_base = OTHER; note = 2'-O-methyl modified nucleotide
  misc_feature 1..24: note = RNA
  misc_feature 25: note = DNA
gaaaatggaacattaacccaacact

SEQ ID NO: 1149 - DNA, 25 bp, synthetic construct
  source 1..25: mol_type = other DNA
  modified_base 2: mod_base = OTHER; note = 2'-O-methyl modified nucleotide
  modified_base 4: mod_base = OTHER; note = 2'-O-methyl modified nucleotide
  modified_base 14: mod_base = OTHER; note = 2'-O-methyl modified nucleotide
  modified_base 16: mod_base = OTHER; note = 2'-O-methyl modified nucleotide
  misc_feature 1..23: note = RNA
  misc_feature 24: note = DNA
  misc_feature 25: note = RNA
aaaatggaacattaaccctacactc

SEQ ID NO: 1150 - RNA, 25 nt, synthetic construct
  source 1..25: mol_type = other RNA
  modified_base 2: mod_base = OTHER; note = 2'-O-methyl modified nucleotide
  modified_base 4: mod_base = OTHER; note = 2'-O-methyl modified nucleotide
  modified_base 14: mod_base = OTHER; note = 2'-O-methyl modified nucleotide
  modified_base 16: mod_base = OTHER; note = 2'-O-methyl modified nucleotide
atggaacattaaccctacaatcgga

SEQ ID NO: 1151 - DNA, 25 bp, synthetic construct
  source 1..25: mol_type = other DNA
  modified_base 2: mod_base = OTHER; note = 2'-O-methyl modified nucleotide
  modified_base 4: mod_base = OTHER; note = 2'-O-methyl modified nucleotide
  modified_base 14: mod_base = OTHER; note = 2'-O-methyl modified nucleotide
  modified_base 16: mod_base = OTHER; note = 2'-O-methyl modified nucleotide
  misc_feature 1..23: note = RNA
  misc_feature 24: note = DNA
  misc_feature 25: note = RNA
actgccagaagtgtgttttagtatg

SEQ ID NO: 1152 - RNA, 25 nt, synthetic construct
  source 1..25: mol_type = other RNA
  modified_base 2: mod_base = OTHER; note = 2'-O-methyl modified nucleotide
  modified_base 4: mod_base = OTHER; note = 2'-O-methyl modified nucleotide
  modified_base 14: mod_base = OTHER; note = 2'-O-methyl modified nucleotide
  modified_base 16: mod_base = OTHER; note = 2'-O-methyl modified nucleotide
ctgccagaagtgtgttttgatatgc

SEQ ID NO: 1153 - RNA, 27 nt, synthetic construct
  source 1..27: mol_type = other RNA
  modified_base 1: mod_base = OTHER; note = 2'-O-methyl modified nucleotide
  modified_base 2: mod_base = OTHER; note = 2'-O-methyl modified nucleotide
  modified_base 3: mod_base = OTHER; note = 2'-O-methyl modified nucleotide
  modified_base 4: mod_base = OTHER; note = 2'-O-methyl modified nucleotide
  modified_base 11: mod_base = OTHER; note = 2'-O-methyl modified nucleotide
  modified_base 13: mod_base = OTHER; note = 2'-O-methyl modified nucleotide
  modified_base 23: mod_base = OTHER; note = 2'-O-methyl modified nucleotide
  modified_base 25: mod_base = OTHER; note = 2'-O-methyl modified nucleotide
  modified_base 26: mod_base = OTHER; note = 2'-O-methyl modified nucleotide
  modified_base 27: mod_base = OTHER; note = 2'-O-methyl modified nucleotide
tggcctttgaaagtcctttcatgaata

SEQ ID NO: 1154 - RNA, 27 nt, synthetic construct
  source 1..27: mol_type = other RNA
  modified_base 1: mod_base = OTHER; note = 2'-O-methyl modified nucleotide
  modified_base 2: mod_base = OTHER; note = 2'-O-methyl modified nucleotide
  modified_base 3: mod_base = OTHER; note = 2'-O-methyl modified nucleotide
  modified_base 4: mod_base = OTHER; note = 2'-O-methyl modified nucleotide
  modified_base 11: mod_base = OTHER; note = 2'-O-methyl modified nucleotide
  modified_base 13: mod_base = OTHER; note = 2'-O-methyl modified nucleotide
  modified_base 23: mod_base = OTHER; note = 2'-O-methyl modified nucleotide
  modified_base 25: mod_base = OTHER; note = 2'-O-methyl modified nucleotide
  modified_base 26: mod_base = OTHER; note = 2'-O-methyl modified nucleotide
  modified_base 27: mod_base = OTHER; note = 2'-O-methyl modified nucleotide
ttggcttttgaaagtcctttcatgaat

SEQ ID NO: 1155 - RNA, 27 nt, synthetic construct
  source 1..27: mol_type = other RNA
  modified_base 1: mod_base = OTHER; note = 2'-O-methyl modified nucleotide
  modified_base 2: mod_base = OTHER; note = 2'-O-methyl modified nucleotide
  modified_base 3: mod_base = OTHER; note = 2'-O-methyl modified nucleotide
  modified_base 4: mod_base = OTHER; note = 2'-O-methyl modified nucleotide
  modified_base 11: mod_base = OTHER; note = 2'-O-methyl modified nucleotide
  modified_base 13: mod_base = OTHER; note = 2'-O-methyl modified nucleotide
  modified_base 23: mod_base = OTHER; note = 2'-O-methyl modified nucleotide
  modified_base 25: mod_base = OTHER; note = 2'-O-methyl modified nucleotide
  modified_base 26: mod_base = OTHER; note = 2'-O-methyl modified nucleotide
  modified_base 27: mod_base = OTHER; note = 2'-O-methyl modified nucleotide
cttggtctttgaaagtcctttcatgaa

SEQ ID NO: 1156 - RNA, 27 nt, synthetic construct
  source 1..27: mol_type = other RNA
  modified_base 1: mod_base = OTHER; note = 2'-O-methyl modified nucleotide
  modified_base 2: mod_base = OTHER; note = 2'-O-methyl modified nucleotide
  modified_base 3: mod_base = OTHER; note = 2'-O-methyl modified nucleotide
  modified_base 4: mod_base = OTHER; note = 2'-O-methyl modified nucleotide
  modified_base 11: mod_base = OTHER; note = 2'-O-methyl modified nucleotide
  modified_base 13: mod_base = OTHER; note = 2'-O-methyl modified nucleotide
  modified_base 23: mod_base = OTHER; note = 2'-O-methyl modified nucleotide
  modified_base 25: mod_base = OTHER; note = 2'-O-methyl modified nucleotide
  modified_base 26: mod_base = OTHER; note = 2'-O-methyl modified nucleotide
  modified_base 27: mod_base = OTHER; note = 2'-O-methyl modified nucleotide
ccttgtcctttgaaagtcctttcatga

SEQ ID NO: 1157 - RNA, 27 nt, synthetic construct
  source 1..27: mol_type = other RNA
  modified_base 1: mod_base = OTHER; note = 2'-O-methyl modified nucleotide
  modified_base 2: mod_base = OTHER; note = 2'-O-methyl modified nucleotide
  modified_base 3: mod_base = OTHER; note = 2'-O-methyl modified nucleotide
  modified_base 4: mod_base = OTHER; note = 2'-O-methyl modified nucleotide
  modified_base 11: mod_base = OTHER; note = 2'-O-methyl modified nucleotide
  modified_base 13: mod_base = OTHER; note = 2'-O-methyl modified nucleotide
  modified_base 23: mod_base = OTHER; note = 2'-O-methyl modified nucleotide
  modified_base 25: mod_base = OTHER; note = 2'-O-methyl modified nucleotide
  modified_base 26: mod_base = OTHER; note = 2'-O-methyl modified nucleotide
  modified_base 27: mod_base = OTHER; note = 2'-O-methyl modified nucleotide
tcctttgcctttgaaagtcctttcatg

SEQ ID NO: 1158 - RNA, 27 nt, synthetic construct
  source 1..27: mol_type = other RNA
  modified_base 1: mod_base = OTHER; note = 2'-O-methyl modified nucleotide
  modified_base 2: mod_base = OTHER; note = 2'-O-methyl modified nucleotide
  modified_base 3: mod_base = OTHER; note = 2'-O-methyl modified nucleotide
  modified_base 4: mod_base = OTHER; note = 2'-O-methyl modified nucleotide
  modified_base 11: mod_base = OTHER; note = 2'-O-methyl modified nucleotide
  modified_base 13: mod_base = OTHER; note = 2'-O-methyl modified nucleotide
  modified_base 23: mod_base = OTHER; note = 2'-O-methyl modified nucleotide
  modified_base 25: mod_base = OTHER; note = 2'-O-methyl modified nucleotide
  modified_base 26: mod_base = OTHER; note = 2'-O-methyl modified nucleotide
  modified_base 27: mod_base = OTHER; note = 2'-O-methyl modified nucleotide
ctccttggcctttgaaagtcctttcat

SEQ ID NO: 1159 - RNA, 27 nt, synthetic construct
  source 1..27: mol_type = other RNA
  modified_base 1: mod_base = OTHER; note = 2'-O-methyl modified nucleotide
  modified_base 2: mod_base = OTHER; note = 2'-O-methyl modified nucleotide
  modified_base 3: mod_base = OTHER; note = 2'-O-methyl modified nucleotide
  modified_base 4: mod_base = OTHER; note = 2'-O-methyl modified nucleotide
  modified_base 11: mod_base = OTHER; note = 2'-O-methyl modified nucleotide
  modified_base 13: mod_base = OTHER; note = 2'-O-methyl modified nucleotide
  modified_base 23: mod_base = OTHER; note = 2'-O-methyl modified nucleotide
  modified_base 25: mod_base = OTHER; note = 2'-O-methyl modified nucleotide
  modified_base 26: mod_base = OTHER; note = 2'-O-methyl modified nucleotide
  modified_base 27: mod_base = OTHER; note = 2'-O-methyl modified nucleotide
ctcagtagcagccacaactccctcctt

SEQ ID NO: 1160 - RNA, 27 nt, synthetic construct
  source 1..27: mol_type = other RNA
  modified_base 1: mod_base = OTHER; note = 2'-O-methyl modified nucleotide
  modified_base 2: mod_base = OTHER; note = 2'-O-methyl modified nucleotide
  modified_base 3: mod_base = OTHER; note = 2'-O-methyl modified nucleotide
  modified_base 4: mod_base = OTHER; note = 2'-O-methyl modified nucleotide
  modified_base 11: mod_base = OTHER; note = 2'-O-methyl modified nucleotide
  modified_base 13: mod_base = OTHER; note = 2'-O-methyl modified nucleotide
  modified_base 23: mod_base = OTHER; note = 2'-O-methyl modified nucleotide
  modified_base 25: mod_base = OTHER; note = 2'-O-methyl modified nucleotide
  modified_base 26: mod_base = OTHER; note = 2'-O-methyl modified nucleotide
  modified_base 27: mod_base = OTHER; note = 2'-O-methyl modified nucleotide
tttcttagcagcagccacaactccctc

SEQ ID NO: 1161 - RNA, 27 nt, synthetic construct
  source 1..27: mol_type = other RNA
  modified_base 1: mod_base = OTHER; note = 2'-O-methyl modified nucleotide
  modified_base 2: mod_base = OTHER; note = 2'-O-methyl modified nucleotide
  modified_base 3: mod_base = OTHER; note = 2'-O-methyl modified nucleotide
  modified_base 4: mod_base = OTHER; note = 2'-O-methyl modified nucleotide
  modified_base 11: mod_base = OTHER; note = 2'-O-methyl modified nucleotide
  modified_base 13: mod_base = OTHER; note = 2'-O-methyl modified nucleotide
  modified_base 23: mod_base = OTHER; note = 2'-O-methyl modified nucleotide
  modified_base 25: mod_base = OTHER; note = 2'-O-methyl modified nucleotide
  modified_base 26: mod_base = OTHER; note = 2'-O-methyl modified nucleotide
  modified_base 27: mod_base = OTHER; note = 2'-O-methyl modified nucleotide
ttttctcagcagcagccacaactccct

SEQ ID NO: 1162 - RNA, 27 nt, synthetic construct
  source 1..27: mol_type = other RNA
  modified_base 1: mod_base = OTHER; note = 2'-O-methyl modified nucleotide
  modified_base 2: mod_base = OTHER; note = 2'-O-methyl modified nucleotide
  modified_base 3: mod_base = OTHER; note = 2'-O-methyl modified nucleotide
  modified_base 4: mod_base = OTHER; note = 2'-O-methyl modified nucleotide
  modified_base 11: mod_base = OTHER; note = 2'-O-methyl modified nucleotide
  modified_base 13: mod_base = OTHER; note = 2'-O-methyl modified nucleotide
  modified_base 23: mod_base = OTHER; note = 2'-O-methyl modified nucleotide
  modified_base 25: mod_base = OTHER; note = 2'-O-methyl modified nucleotide
  modified_base 26: mod_base = OTHER; note = 2'-O-methyl modified nucleotide
  modified_base 27: mod_base = OTHER; note = 2'-O-methyl modified nucleotide
gttttttcagcagcagccacaactccc

SEQ ID NO: 1163 - RNA, 27 nt, synthetic construct
  source 1..27: mol_type = other RNA
  modified_base 1: mod_base = OTHER; note = 2'-O-methyl modified nucleotide
  modified_base 2: mod_base = OTHER; note = 2'-O-methyl modified nucleotide
  modified_base 3: mod_base = OTHER; note = 2'-O-methyl modified nucleotide
  modified_base 4: mod_base = OTHER; note = 2'-O-methyl modified nucleotide
  modified_base 11: mod_base = OTHER; note = 2'-O-methyl modified nucleotide
  modified_base 13: mod_base = OTHER; note = 2'-O-methyl modified nucleotide
  modified_base 23: mod_base = OTHER; note = 2'-O-methyl modified nucleotide
  modified_base 25: mod_base = OTHER; note = 2'-O-methyl modified nucleotide
  modified_base 26: mod_base = OTHER; note = 2'-O-methyl modified nucleotide
  modified_base 27: mod_base = OTHER; note = 2'-O-methyl modified nucleotide
tggttttctcagcagcagccacaactc

SEQ ID NO: 1164 - RNA, 27 nt, synthetic construct
  source 1..27: mol_type = other RNA
  modified_base 1: mod_base = OTHER; note = 2'-O-methyl modified nucleotide
  modified_base 2: mod_base = OTHER; note = 2'-O-methyl modified nucleotide
  modified_base 3: mod_base = OTHER; note = 2'-O-methyl modified nucleotide
  modified_base 4: mod_base = OTHER; note = 2'-O-methyl modified nucleotide
  modified_base 11: mod_base = OTHER; note = 2'-O-methyl modified nucleotide
  modified_base 13: mod_base = OTHER; note = 2'-O-methyl modified nucleotide
  modified_base 23: mod_base = OTHER; note = 2'-O-methyl modified nucleotide
  modified_base 25: mod_base = OTHER; note = 2'-O-methyl modified nucleotide
  modified_base 26: mod_base = OTHER; note = 2'-O-methyl modified nucleotide
  modified_base 27: mod_base = OTHER; note = 2'-O-methyl modified nucleotide
ttggttttctcagcagcagccacaact

SEQ ID NO: 1165 - RNA, 27 nt, synthetic construct
  source 1..27: mol_type = other RNA
  modified_base 1: mod_base = OTHER; note = 2'-O-methyl modified nucleotide
  modified_base 2: mod_base = OTHER; note = 2'-O-methyl modified nucleotide
  modified_base 3: mod_base = OTHER; note = 2'-O-methyl modified nucleotide
  modified_base 4: mod_base = OTHER; note = 2'-O-methyl modified nucleotide
  modified_base 11: mod_base = OTHER; note = 2'-O-methyl modified nucleotide
  modified_base 13: mod_base = OTHER; note = 2'-O-methyl modified nucleotide
  modified_base 23: mod_base = OTHER; note = 2'-O-methyl modified nucleotide
  modified_base 25: mod_base = OTHER; note = 2'-O-methyl modified nucleotide
  modified_base 26: mod_base = OTHER; note = 2'-O-methyl modified nucleotide
  modified_base 27: mod_base = OTHER; note = 2'-O-methyl modified nucleotide
tttggttttctcagcagcagccacaac

SEQ ID NO: 1166 - RNA, 27 nt, synthetic construct
  source 1..27: mol_type = other RNA
  modified_base 1: mod_base = OTHER; note = 2'-O-methyl modified nucleotide
  modified_base 2: mod_base = OTHER; note = 2'-O-methyl modified nucleotide
  modified_base 3: mod_base = OTHER; note = 2'-O-methyl modified nucleotide
  modified_base 4: mod_base = OTHER; note = 2'-O-methyl modified nucleotide
  modified_base 11: mod_base = OTHER; note = 2'-O-methyl modified nucleotide
  modified_base 13: mod_base = OTHER; note = 2'-O-methyl modified nucleotide
  modified_base 23: mod_base = OTHER; note = 2'-O-methyl modified nucleotide
  modified_base 25: mod_base = OTHER; note = 2'-O-methyl modified nucleotide
  modified_base 26: mod_base = OTHER; note = 2'-O-methyl modified nucleotide
  modified_base 27: mod_base = OTHER; note = 2'-O-methyl modified nucleotide
gtttgtttttctcagcagcagccacaa

SEQ ID NO: 1167 - RNA, 27 nt, synthetic construct
  source 1..27: mol_type = other RNA
  modified_base 1: mod_base = OTHER; note = 2'-O-methyl modified nucleotide
  modified_base 2: mod_base = OTHER; note = 2'-O-methyl modified nucleotide
  modified_base 3: mod_base = OTHER; note = 2'-O-methyl modified nucleotide
  modified_base 4: mod_base = OTHER; note = 2'-O-methyl modified nucleotide
  modified_base 11: mod_base = OTHER; note = 2'-O-methyl modified nucleotide
  modified_base 13: mod_base = OTHER; note = 2'-O-methyl modified nucleotide
  modified_base 23: mod_base = OTHER; note = 2'-O-methyl modified nucleotide
  modified_base 25: mod_base = OTHER; note = 2'-O-methyl modified nucleotide
  modified_base 26: mod_base = OTHER; note = 2'-O-methyl modified nucleotide
  modified_base 27: mod_base = OTHER; note = 2'-O-methyl modified nucleotide
tgttttgttttctcagcagcagccaca

SEQ ID NO: 1168 - RNA, 27 nt, synthetic construct
  source 1..27: mol_type = other RNA
  modified_base 1: mod_base = OTHER; note = 2'-O-methyl modified nucleotide
  modified_base 2: mod_base = OTHER; note = 2'-O-methyl modified nucleotide
  modified_base 3: mod_base = OTHER; note = 2'-O-methyl modified nucleotide
  modified_base 4: mod_base = OTHER; note = 2'-O-methyl modified nucleotide
  modified_base 11: mod_base = OTHER; note = 2'-O-methyl modified nucleotide
  modified_base 13: mod_base = OTHER; note = 2'-O-methyl modified nucleotide
  modified_base 23: mod_base = OTHER; note = 2'-O-methyl modified nucleotide
  modified_base 25: mod_base = OTHER; note = 2'-O-methyl modified nucleotide
  modified_base 26: mod_base = OTHER; note = 2'-O-methyl modified nucleotide
  modified_base 27: mod_base = OTHER; note = 2'-O-methyl modified nucleotide
ctgtttggttttctcagcagcagccac

SEQ ID NO: 1169 - RNA, 27 nt, synthetic construct
  source 1..27: mol_type = other RNA
  modified_base 1: mod_base = OTHER; note = 2'-O-methyl modified nucleotide
  modified_base 2: mod_base = OTHER; note = 2'-O-methyl modified nucleotide
  modified_base 3: mod_base = OTHER; note = 2'-O-methyl modified nucleotide
  modified_base 4: mod_base = OTHER; note = 2'-O-methyl modified nucleotide
  modified_base 11: mod_base = OTHER; note = 2'-O-methyl modified nucleotide
  modified_base 13: mod_base = OTHER; note = 2'-O-methyl modified nucleotide
  modified_base 23: mod_base = OTHER; note = 2'-O-methyl modified nucleotide
  modified_base 25: mod_base = OTHER; note = 2'-O-methyl modified nucleotide
  modified_base 26: mod_base = OTHER; note = 2'-O-methyl modified nucleotide
  modified_base 27: mod_base = OTHER; note = 2'-O-methyl modified nucleotide
tcttttgtcttctcagccactgttgcc

SEQ ID NO: 1170 - RNA, 27 nt, synthetic construct
  source 1..27: mol_type = other RNA
  modified_base 1: mod_base = OTHER; note = 2'-O-methyl modified nucleotide
  modified_base 2: mod_base = OTHER; note = 2'-O-methyl modified nucleotide
  modified_base 3: mod_base = OTHER; note = 2'-O-methyl modified nucleotide
  modified_base 4: mod_base = OTHER; note = 2'-O-methyl modified nucleotide
  modified_base 11: mod_base = OTHER; note = 2'-O-methyl modified nucleotide
  modified_base 13: mod_base = OTHER; note = 2'-O-methyl modified nucleotide
  modified_base 23: mod_base = OTHER; note = 2'-O-methyl modified nucleotide
  modified_base 25: mod_base = OTHER; note = 2'-O-methyl modified nucleotide
  modified_base 26: mod_base = OTHER; note = 2'-O-methyl modified nucleotide
  modified_base 27: mod_base = OTHER; note = 2'-O-methyl modified nucleotide
ctctttggtcttctcagccactgttgc

SEQ ID NO: 1171 - RNA, 27 nt, synthetic construct
  source 1..27: mol_type = other RNA
  modified_base 1: mod_base = OTHER; note = 2'-O-methyl modified nucleotide
  modified_base 2: mod_base = OTHER; note = 2'-O-methyl modified nucleotide
  modified_base 3: mod_base = OTHER; note = 2'-O-methyl modified nucleotide
  modified_base 4: mod_base = OTHER; note = 2'-O-methyl modified nucleotide
  modified_base 11: mod_base = OTHER; note = 2'-O-methyl modified nucleotide
  modified_base 13: mod_base = OTHER; note = 2'-O-methyl modified nucleotide
  modified_base 23: mod_base = OTHER; note = 2'-O-methyl modified nucleotide
  modified_base 25: mod_base = OTHER; note = 2'-O-methyl modified nucleotide
  modified_base 26: mod_base = OTHER; note = 2'-O-methyl modified nucleotide
  modified_base 27: mod_base = OTHER; note = 2'-O-methyl modified nucleotide
gctctttggtcttctcagccactgttg

SEQ ID NO: 1172 - RNA, 27 nt, synthetic construct
  source 1..27: mol_type = other RNA
  modified_base 1: mod_base = OTHER; note = 2'-O-methyl modified nucleotide
  modified_base 2: mod_base = OTHER; note = 2'-O-methyl modified nucleotide
  modified_base 3: mod_base = OTHER; note = 2'-O-methyl modified nucleotide
  modified_base 4: mod_base = OTHER; note = 2'-O-methyl modified nucleotide
  modified_base 11: mod_base = OTHER; note = 2'-O-methyl modified nucleotide
  modified_base 13: mod_base = OTHER; note = 2'-O-methyl modified nucleotide
  modified_base 23: mod_base = OTHER; note = 2'-O-methyl modified nucleotide
  modified_base 25: mod_base = OTHER; note = 2'-O-methyl modified nucleotide
  modified_base 26: mod_base = OTHER; note = 2'-O-methyl modified nucleotide
  modified_base 27: mod_base = OTHER; note = 2'-O-methyl modified nucleotide
tgctctttggtcttctcagccactgtt

SEQ ID NO: 1173 - RNA, 27 nt, synthetic construct
  source 1..27: mol_type = other RNA
  modified_base 1: mod_base = OTHER; note = 2'-O-methyl modified nucleotide
  modified_base 2: mod_base = OTHER; note = 2'-O-methyl modified nucleotide
  modified_base 3: mod_base = OTHER; note = 2'-O-methyl modified nucleotide
  modified_base 4: mod_base = OTHER; note = 2'-O-methyl modified nucleotide
  modified_base 11: mod_base = OTHER; note = 2'-O-methyl modified nucleotide
  modified_base 13: mod_base = OTHER; note = 2'-O-methyl modified nucleotide
  modified_base 23: mod_base = OTHER; note = 2'-O-methyl modified nucleotide
  modified_base 25: mod_base = OTHER; note = 2'-O-methyl modified nucleotide
  modified_base 26: mod_base = OTHER; note = 2'-O-methyl modified nucleotide
  modified_base 27: mod_base = OTHER; note = 2'-O-methyl modified nucleotide
ttgctttttggtcttctcagccactgt

SEQ ID NO: 1174 - RNA, 27 nt, synthetic construct
  source 1..27: mol_type = other RNA
  modified_base 1: mod_base = OTHER; note = 2'-O-methyl modified nucleotide
  modified_base 2: mod_base = OTHER; note = 2'-O-methyl modified nucleotide
  modified_base 3: mod_base = OTHER; note = 2'-O-methyl modified nucleotide
  modified_base 4: mod_base = OTHER; note = 2'-O-methyl modified nucleotide
  modified_base 11: mod_base = OTHER; note = 2'-O-methyl modified nucleotide
  modified_base 13: mod_base = OTHER; note = 2'-O-methyl modified nucleotide
  modified_base 23: mod_base = OTHER; note = 2'-O-methyl modified nucleotide
  modified_base 25: mod_base = OTHER; note = 2'-O-methyl modified nucleotide
  modified_base 26: mod_base = OTHER; note = 2'-O-methyl modified nucleotide
  modified_base 27: mod_base = OTHER; note = 2'-O-methyl modified nucleotide
cttgctctttggtcttctcagccactg

SEQ ID NO: 1175 - RNA, 27 nt, synthetic construct
  source 1..27: mol_type = other RNA
  modified_base 1: mod_base = OTHER; note = 2'-O-methyl modified nucleotide
  modified_base 2: mod_base = OTHER; note = 2'-O-methyl modified nucleotide
  modified_base 3: mod_base = OTHER; note = 2'-O-methyl modified nucleotide
  modified_base 4: mod_base = OTHER; note = 2'-O-methyl modified nucleotide
  modified_base 11: mod_base = OTHER; note = 2'-O-methyl modified nucleotide
  modified_base 13: mod_base = OTHER; note = 2'-O-methyl modified nucleotide
  modified_base 23: mod_base = OTHER; note = 2'-O-methyl modified nucleotide
  modified_base 25: mod_base = OTHER; note = 2'-O-methyl modified nucleotide
  modified_base 26: mod_base = OTHER; note = 2'-O-methyl modified nucleotide
  modified_base 27: mod_base = OTHER; note = 2'-O-methyl modified nucleotide
acttgttctttggtcttctcagccact

SEQ ID NO: 1176 - RNA, 27 nt, synthetic construct
  source 1..27: mol_type = other RNA
  modified_base 1: mod_base = OTHER; note = 2'-O-methyl modified nucleotide
  modified_base 2: mod_base = OTHER; note = 2'-O-methyl modified nucleotide
  modified_base 3: mod_base = OTHER; note = 2'-O-methyl modified nucleotide
  modified_base 4: mod_base = OTHER; note = 2'-O-methyl modified nucleotide
  modified_base 11: mod_base = OTHER; note = 2'-O-methyl modified nucleotide
  modified_base 13: mod_base = OTHER; note = 2'-O-methyl modified nucleotide
  modified_base 23: mod_base = OTHER; note = 2'-O-methyl modified nucleotide
  modified_base 25: mod_base = OTHER; note = 2'-O-methyl modified nucleotide
  modified_base 26: mod_base = OTHER; note = 2'-O-methyl modified nucleotide
  modified_base 27: mod_base = OTHER; note = 2'-O-methyl modified nucleotide
cactttctctttggtcttctcagccac

SEQ ID NO: 1177 - RNA, 27 nt, synthetic construct
  source 1..27: mol_type = other RNA
  modified_base 1: mod_base = OTHER; note = 2'-O-methyl modified nucleotide
  modified_base 2: mod_base = OTHER; note = 2'-O-methyl modified nucleotide
  modified_base 3: mod_base = OTHER; note = 2'-O-methyl modified nucleotide
  modified_base 4: mod_base = OTHER; note = 2'-O-methyl modified nucleotide
  modified_base 11: mod_base = OTHER; note = 2'-O-methyl modified nucleotide
  modified_base 13: mod_base = OTHER; note = 2'-O-methyl modified nucleotide
  modified_base 23: mod_base = OTHER; note = 2'-O-methyl modified nucleotide
  modified_base 25: mod_base = OTHER; note = 2'-O-methyl modified nucleotide
  modified_base 26: mod_base = OTHER; note = 2'-O-methyl modified nucleotide
  modified_base 27: mod_base = OTHER; note = 2'-O-methyl modified nucleotide
tcacttgctctttggtcttctcagcca

SEQ ID NO: 1178 - RNA, 27 nt, synthetic construct
  source 1..27: mol_type = other RNA
  modified_base 1: mod_base = OTHER; note = 2'-O-methyl modified nucleotide
  modified_base 2: mod_base = OTHER; note = 2'-O-methyl modified nucleotide
  modified_base 3: mod_base = OTHER; note = 2'-O-methyl modified nucleotide
  modified_base 4: mod_base = OTHER; note = 2'-O-methyl modified nucleotide
  modified_base 11: mod_base = OTHER; note = 2'-O-methyl modified nucleotide
  modified_base 13: mod_base = OTHER; note = 2'-O-methyl modified nucleotide
  modified_base 23: mod_base = OTHER; note = 2'-O-methyl modified nucleotide
  modified_base 25: mod_base = OTHER; note = 2'-O-methyl modified nucleotide
  modified_base 26: mod_base = OTHER; note = 2'-O-methyl modified nucleotide
  modified_base 27: mod_base = OTHER; note = 2'-O-methyl modified nucleotide
gtcacttgctctttggtcttctcagcc

SEQ ID NO: 1179 - RNA, 27 nt, synthetic construct
  source 1..27: mol_type = other RNA
  modified_base 1: mod_base = OTHER; note = 2'-O-methyl modified nucleotide
  modified_base 2: mod_base = OTHER; note = 2'-O-methyl modified nucleotide
  modified_base 3: mod_base = OTHER; note = 2'-O-methyl modified nucleotide
  modified_base 4: mod_base = OTHER; note = 2'-O-methyl modified nucleotide
  modified_base 11: mod_base = OTHER; note = 2'-O-methyl modified nucleotide
  modified_base 13: mod_base = OTHER; note = 2'-O-methyl modified nucleotide
  modified_base 23: mod_base = OTHER; note = 2'-O-methyl modified nucleotide
  modified_base 25: mod_base = OTHER; note = 2'-O-methyl modified nucleotide
  modified_base 26: mod_base = OTHER; note = 2'-O-methyl modified nucleotide
  modified_base 27: mod_base = OTHER; note = 2'-O-methyl modified nucleotide
tgtcatttgctctttggtcttctcagc

SEQ ID NO: 1180 - RNA, 27 nt, synthetic construct
  source 1..27: mol_type = other RNA
  modified_base 1: mod_base = OTHER; note = 2'-O-methyl modified nucleotide
  modified_base 2: mod_base = OTHER; note = 2'-O-methyl modified nucleotide
  modified_base 3: mod_base = OTHER; note = 2'-O-methyl modified nucleotide
  modified_base 4: mod_base = OTHER; note = 2'-O-methyl modified nucleotide
  modified_base 11: mod_base = OTHER; note = 2'-O-methyl modified nucleotide
  modified_base 13: mod_base = OTHER; note = 2'-O-methyl modified nucleotide
  modified_base 23: mod_base = OTHER; note = 2'-O-methyl modified nucleotide
  modified_base 25: mod_base = OTHER; note = 2'-O-methyl modified nucleotide
  modified_base 26: mod_base = OTHER; note = 2'-O-methyl modified nucleotide
  modified_base 27: mod_base = OTHER; note = 2'-O-methyl modified nucleotide
ttgtctcttgctctttggtcttctcag

SEQ ID NO: 1181 - RNA, 27 nt, synthetic construct
  source 1..27: mol_type = other RNA
  modified_base 1: mod_base = OTHER; note = 2'-O-methyl modified nucleotide
  modified_base 2: mod_base = OTHER; note = 2'-O-methyl modified nucleotide
  modified_base 3: mod_base = OTHER; note = 2'-O-methyl modified nucleotide
  modified_base 4: mod_base = OTHER; note = 2'-O-methyl modified nucleotide
  modified_base 11: mod_base = OTHER; note = 2'-O-methyl modified nucleotide
  modified_base 13: mod_base = OTHER; note = 2'-O-methyl modified nucleotide
  modified_base 23: mod_base = OTHER; note = 2'-O-methyl modified nucleotide
  modified_base 25: mod_base = OTHER; note = 2'-O-methyl modified nucleotide
  modified_base 26: mod_base = OTHER; note = 2'-O-methyl modified nucleotide
  modified_base 27: mod_base = OTHER; note = 2'-O-methyl modified nucleotide
tttgttacttgctctttggtcttctca

SEQ ID NO: 1182 - RNA, 27 nt, synthetic construct
  source 1..27: mol_type = other RNA
  modified_base 1: mod_base = OTHER; note = 2'-O-methyl modified nucleotide
  modified_base 2: mod_base = OTHER; note = 2'-O-methyl modified nucleotide
  modified_base 3: mod_base = OTHER; note = 2'-O-methyl modified nucleotide
  modified_base 4: mod_base = OTHER; note = 2'-O-methyl modified nucleotide
  modified_base 11: mod_base = OTHER; note = 2'-O-methyl modified nucleotide
  modified_base 13: mod_base = OTHER; note = 2'-O-methyl modified nucleotide
  modified_base 23: mod_base = OTHER; note = 2'-O-methyl modified nucleotide
  modified_base 25: mod_base = OTHER; note = 2'-O-methyl modified nucleotide
  modified_base 26: mod_base = OTHER; note = 2'-O-methyl modified nucleotide
  modified_base 27: mod_base = OTHER; note = 2'-O-methyl modified nucleotide
atttgtcacttgctctttggtcttctc

SEQ ID NO: 1183 - RNA, 27 nt, synthetic construct
  source 1..27: mol_type = other RNA
  modified_base 1: mod_base = OTHER; note = 2'-O-methyl modified nucleotide
  modified_base 2: mod_base = OTHER; note = 2'-O-methyl modified nucleotide
  modified_base 3: mod_base = OTHER; note = 2'-O-methyl modified nucleotide
  modified_base 4: mod_base = OTHER; note = 2'-O-methyl modified nucleotide
  modified_base 11: mod_base = OTHER; note = 2'-O-methyl modified nucleotide
  modified_base 13: mod_base = OTHER; note = 2'-O-methyl modified nucleotide
  modified_base 23: mod_base = OTHER; note = 2'-O-methyl modified nucleotide
  modified_base 25: mod_base = OTHER; note = 2'-O-methyl modified nucleotide
  modified_base 26: mod_base = OTHER; note = 2'-O-methyl modified nucleotide
  modified_base 27: mod_base = OTHER; note = 2'-O-methyl modified nucleotide
catttttcacttgctctttggtcttct

SEQ ID NO: 1184 - RNA, 27 nt, synthetic construct
  source 1..27: mol_type = other RNA
  modified_base 1: mod_base = OTHER; note = 2'-O-methyl modified nucleotide
  modified_base 2: mod_base = OTHER; note = 2'-O-methyl modified nucleotide
  modified_base 3: mod_base = OTHER; note = 2'-O-methyl modified nucleotide
  modified_base 4: mod_base = OTHER; note = 2'-O-methyl modified nucleotide
  modified_base 11: mod_base = OTHER; note = 2'-O-methyl modified nucleotide
  modified_base 13: mod_base = OTHER; note = 2'-O-methyl modified nucleotide
  modified_base 23: mod_base = OTHER; note = 2'-O-methyl modified nucleotide
  modified_base 25: mod_base = OTHER; note = 2'-O-methyl modified nucleotide
  modified_base 26: mod_base = OTHER; note = 2'-O-methyl modified nucleotide
  modified_base 27: mod_base = OTHER; note = 2'-O-methyl modified nucleotide
acatttgtcacttgctctttggtcttc

SEQ ID NO: 1185 - RNA, 27 nt, synthetic construct
  source 1..27: mol_type = other RNA
  modified_base 1: mod_base = OTHER; note = 2'-O-methyl modified nucleotide
  modified_base 2: mod_base = OTHER; note = 2'-O-methyl modified nucleotide
  modified_base 3: mod_base = OTHER; note = 2'-O-methyl modified nucleotide
  modified_base 4: mod_base = OTHER; note = 2'-O-methyl modified nucleotide
  modified_base 11: mod_base = OTHER; note = 2'-O-methyl modified nucleotide
  modified_base 13: mod_base = OTHER; note = 2'-O-methyl modified nucleotide
  modified_base 23: mod_base = OTHER; note = 2'-O-methyl modified nucleotide
  modified_base 25: mod_base = OTHER; note = 2'-O-methyl modified nucleotide
  modified_base 26: mod_base = OTHER; note = 2'-O-methyl modified nucleotide
  modified_base 27: mod_base = OTHER; note = 2'-O-methyl modified nucleotide
aacatttgtcacttgctctttggtctt

SEQ ID NO: 1186 - RNA, 27 nt, synthetic construct
  source 1..27: mol_type = other RNA
  modified_base 1: mod_base = OTHER; note = 2'-O-methyl modified nucleotide
  modified_base 2: mod_base = OTHER; note = 2'-O-methyl modified nucleotide
  modified_base 3: mod_base = OTHER; note = 2'-O-methyl modified nucleotide
  modified_base 4: mod_base = OTHER; note = 2'-O-methyl modified nucleotide
  modified_base 11: mod_base = OTHER; note = 2'-O-methyl modified nucleotide
  modified_base 13: mod_base = OTHER; note = 2'-O-methyl modified nucleotide
  modified_base 23: mod_base = OTHER; note = 2'-O-methyl modified nucleotide
  modified_base 25: mod_base = OTHER; note = 2'-O-methyl modified nucleotide
  modified_base 26: mod_base = OTHER; note = 2'-O-methyl modified nucleotide
  modified_base 27: mod_base = OTHER; note = 2'-O-methyl modified nucleotide
caacatttgtcacttgctctttggtct

SEQ ID NO: 1187 - RNA, 27 nt, synthetic construct
  source 1..27: mol_type = other RNA
  modified_base 1: mod_base = OTHER; note = 2'-O-methyl modified nucleotide
  modified_base 2: mod_base = OTHER; note = 2'-O-methyl modified nucleotide
  modified_base 3: mod_base = OTHER; note = 2'-O-methyl modified nucleotide
  modified_base 4: mod_base = OTHER; note = 2'-O-methyl modified nucleotide
  modified_base 11: mod_base = OTHER; note = 2'-O-methyl modified nucleotide
  modified_base 13: mod_base = OTHER; note = 2'-O-methyl modified nucleotide
  modified_base 23: mod_base = OTHER; note = 2'-O-methyl modified nucleotide
  modified_base 25: mod_base = OTHER; note = 2'-O-methyl modified nucleotide
  modified_base 26: mod_base = OTHER; note = 2'-O-methyl modified nucleotide
  modified_base 27: mod_base = OTHER; note = 2'-O-methyl modified nucleotide
ccaacttttgtcacttgctctttggtc

SEQ ID NO: 1188 - RNA, 27 nt, synthetic construct
  source 1..27: mol_type = other RNA
  modified_base 1: mod_base = OTHER; note = 2'-O-methyl modified nucleotide
  modified_base 2: mod_base = OTHER; note = 2'-O-methyl modified nucleotide
  modified_base 3: mod_base = OTHER; note = 2'-O-methyl modified nucleotide
  modified_base 4: mod_base = OTHER; note = 2'-O-methyl modified nucleotide
  modified_base 11: mod_base = OTHER; note = 2'-O-methyl modified nucleotide
  modified_base 13: mod_base = OTHER; note = 2'-O-methyl modified nucleotide
  modified_base 23: mod_base = OTHER; note = 2'-O-methyl modified nucleotide
  modified_base 25: mod_base = OTHER; note = 2'-O-methyl modified nucleotide
  modified_base 26: mod_base = OTHER; note = 2'-O-methyl modified nucleotide
  modified_base 27: mod_base = OTHER; note = 2'-O-methyl modified nucleotide
tccaatatttgtcacttgctctttggt

SEQ ID NO: 1189 - RNA, 27 nt, synthetic construct
  source 1..27: mol_type = other RNA
  modified_base 1: mod_base = OTHER; note = 2'-O-methyl modified nucleotide
  modified_base 2: mod_base = OTHER; note = 2'-O-methyl modified nucleotide
  modified_base 3: mod_base = OTHER; note = 2'-O-methyl modified nucleotide
  modified_base 4: mod_base = OTHER; note = 2'-O-methyl modified nucleotide
  modified_base 11: mod_base = OTHER; note = 2'-O-methyl modified nucleotide
  modified_base 13: mod_base = OTHER; note = 2'-O-methyl modified nucleotide
  modified_base 23: mod_base = OTHER; note = 2'-O-methyl modified nucleotide
  modified_base 25: mod_base = OTHER; note = 2'-O-methyl modified nucleotide
  modified_base 26: mod_base = OTHER; note = 2'-O-methyl modified nucleotide
  modified_base 27: mod_base = OTHER; note = 2'-O-methyl modified nucleotide
ctccatcatttgtcacttgctctttgg

SEQ ID NO: 1190 - RNA, 27 nt, synthetic construct
  source 1..27: mol_type = other RNA
  modified_base 1: mod_base = OTHER; note = 2'-O-methyl modified nucleotide
  modified_base 2: mod_base = OTHER; note = 2'-O-methyl modified nucleotide
  modified_base 3: mod_base = OTHER; note = 2'-O-methyl modified nucleotide
  modified_base 4: mod_base = OTHER; note = 2'-O-methyl modified nucleotide
  modified_base 11: mod_base = OTHER; note = 2'-O-methyl modified nucleotide
  modified_base 13: mod_base = OTHER; note = 2'-O-methyl modified nucleotide
  modified_base 23: mod_base = OTHER; note = 2'-O-methyl modified nucleotide
  modified_base 25: mod_base = OTHER; note = 2'-O-methyl modified nucleotide
  modified_base 26: mod_base = OTHER; note = 2'-O-methyl modified nucleotide
  modified_base 27: mod_base = OTHER; note = 2'-O-methyl modified nucleotide
cctcctacatttgtcacttgctctttg

SEQ ID NO: 1191 - RNA, 27 nt, synthetic construct
  source 1..27: mol_type = other RNA
  modified_base 1: mod_base = OTHER; note = 2'-O-methyl modified nucleotide
  modified_base 2: mod_base = OTHER; note = 2'-O-methyl modified nucleotide
  modified_base 3: mod_base = OTHER; note = 2'-O-methyl modified nucleotide
  modified_base 4: mod_base = OTHER; note = 2'-O-methyl modified nucleotide
  modified_base 11: mod_base = OTHER; note = 2'-O-methyl modified nucleotide
  modified_base 13: mod_base = OTHER; note = 2'-O-methyl modified nucleotide
  modified_base 23: mod_base = OTHER; note = 2'-O-methyl modified nucleotide
  modified_base 25: mod_base = OTHER; note = 2'-O-methyl modified nucleotide
  modified_base 26: mod_base = OTHER; note = 2'-O-methyl modified nucleotide
  modified_base 27: mod_base = OTHER; note = 2'-O-methyl modified nucleotide
tcctctaacatttgtcacttgctcttt

SEQ ID NO: 1192 - RNA, 27 nt, synthetic construct
  source 1..27: mol_type = other RNA
  modified_base 1: mod_base = OTHER; note = 2'-O-methyl modified nucleotide
  modified_base 2: mod_base = OTHER; note = 2'-O-methyl modified nucleotide
  modified_base 3: mod_base = OTHER; note = 2'-O-methyl modified nucleotide
  modified_base 4: mod_base = OTHER; note = 2'-O-methyl modified nucleotide
  modified_base 11: mod_base = OTHER; note = 2'-O-methyl modified nucleotide
  modified_base 13: mod_base = OTHER; note = 2'-O-methyl modified nucleotide
  modified_base 23: mod_base = OTHER; note = 2'-O-methyl modified nucleotide
  modified_base 25: mod_base = OTHER; note = 2'-O-methyl modified nucleotide
  modified_base 26: mod_base = OTHER; note = 2'-O-methyl modified nucleotide
  modified_base 27: mod_base = OTHER; note = 2'-O-methyl modified nucleotide
ctccttcaacatttgtcacttgctctt

SEQ ID NO: 1193 - RNA, 27 nt, synthetic construct
  source 1..27: mol_type = other RNA
  modified_base 1: mod_base = OTHER; note = 2'-O-methyl modified nucleotide
  modified_base 2: mod_base = OTHER; note = 2'-O-methyl modified nucleotide
  modified_base 3: mod_base = OTHER; note = 2'-O-methyl modified nucleotide
  modified_base 4: mod_base = OTHER; note = 2'-O-methyl modified nucleotide
  modified_base 11: mod_base = OTHER; note = 2'-O-methyl modified nucleotide
  modified_base 13: mod_base = OTHER; note = 2'-O-methyl modified nucleotide
  modified_base 23: mod_base = OTHER; note = 2'-O-methyl modified nucleotide
  modified_base 25: mod_base = OTHER; note = 2'-O-methyl modified nucleotide
  modified_base 26: mod_base = OTHER; note = 2'-O-methyl modified nucleotide
  modified_base 27: mod_base = OTHER; note = 2'-O-methyl modified nucleotide
gctcctccaacatttgtcacttgctct

SEQ ID NO: 1194 - RNA, 27 nt, synthetic construct
  source 1..27: mol_type = other RNA
  modified_base 1: mod_base = OTHER; note = 2'-O-methyl modified nucleotide
  modified_base 2: mod_base = OTHER; note = 2'-O-methyl modified nucleotide
  modified_base 3: mod_base = OTHER; note = 2'-O-methyl modified nucleotide
  modified_base 4: mod_base = OTHER; note = 2'-O-methyl modified nucleotide
  modified_base 11: mod_base = OTHER; note = 2'-O-methyl modified nucleotide
  modified_base 13: mod_base = OTHER; note = 2'-O-methyl modified nucleotide
  modified_base 23: mod_base = OTHER; note = 2'-O-methyl modified nucleotide
  modified_base 25: mod_base = OTHER; note = 2'-O-methyl modified nucleotide
  modified_base 26: mod_base = OTHER; note = 2'-O-methyl modified nucleotide
  modified_base 27: mod_base = OTHER; note = 2'-O-methyl modified nucleotide
tgctcttccaacatttgtcacttgctc

SEQ ID NO: 1195 - RNA, 27 nt, synthetic construct
  source 1..27: mol_type = other RNA
  modified_base 1: mod_base = OTHER; note = 2'-O-methyl modified nucleotide
  modified_base 2: mod_base = OTHER; note = 2'-O-methyl modified nucleotide
  modified_base 3: mod_base = OTHER; note = 2'-O-methyl modified nucleotide
  modified_base 4: mod_base = OTHER; note = 2'-O-methyl modified nucleotide
  modified_base 11: mod_base = OTHER; note = 2'-O-methyl modified nucleotide
  modified_base 13: mod_base = OTHER; note = 2'-O-methyl modified nucleotide
  modified_base 23: mod_base = OTHER; note = 2'-O-methyl modified nucleotide
  modified_base 25: mod_base = OTHER; note = 2'-O-methyl modified nucleotide
  modified_base 26: mod_base = OTHER; note = 2'-O-methyl modified nucleotide
  modified_base 27: mod_base = OTHER; note = 2'-O-methyl modified nucleotide
ctgcttctccaacatttgtcacttgct

SEQ ID NO: 1196 - RNA, 27 nt, synthetic construct
  source 1..27: mol_type = other RNA
  modified_base 1: mod_base = OTHER; note = 2'-O-methyl modified nucleotide
  modified_base 2: mod_base = OTHER; note = 2'-O-methyl modified nucleotide
  modified_base 3: mod_base = OTHER; note = 2'-O-methyl modified nucleotide
  modified_base 4: mod_base = OTHER; note = 2'-O-methyl modified nucleotide
  modified_base 11: mod_base = OTHER; note = 2'-O-methyl modified nucleotide
  modified_base 13: mod_base = OTHER; note = 2'-O-methyl modified nucleotide
  modified_base 23: mod_base = OTHER; note = 2'-O-methyl modified nucleotide
  modified_base 25: mod_base = OTHER; note = 2'-O-methyl modified nucleotide
  modified_base 26: mod_base = OTHER; note = 2'-O-methyl modified nucleotide
  modified_base 27: mod_base = OTHER; note = 2'-O-methyl modified nucleotide
actgctcctccaacatttgtcacttgc

SEQ ID NO: 1197 - RNA, 27 nt, synthetic construct
  source 1..27: mol_type = other RNA
  modified_base 1: mod_base = OTHER; note = 2'-O-methyl modified nucleotide
  modified_base 2: mod_base = OTHER; note = 2'-O-methyl modified nucleotide
  modified_base 3: mod_base = OTHER; note = 2'-O-methyl modified nucleotide
  modified_base 4: mod_base = OTHER; note = 2'-O-methyl modified nucleotide
  modified_base 11: mod_base = OTHER; note = 2'-O-methyl modified nucleotide
  modified_base 13: mod_base = OTHER; note = 2'-O-methyl modified nucleotide
  modified_base 23: mod_base = OTHER; note = 2'-O-methyl modified nucleotide
  modified_base 25: mod_base = OTHER; note = 2'-O-methyl modified nucleotide
  modified_base 26: mod_base = OTHER; note = 2'-O-methyl modified nucleotide
  modified_base 27: mod_base = OTHER; note = 2'-O-methyl modified nucleotide
cactgttcctccaacatttgtcacttg

SEQ ID NO: 1198 - RNA, 27 nt, synthetic construct
  source 1..27: mol_type = other RNA
  modified_base 1: mod_base = OTHER; note = 2'-O-methyl modified nucleotide
  modified_base 2: mod_base = OTHER; note = 2'-O-methyl modified nucleotide
  modified_base 3: mod_base = OTHER; note = 2'-O-methyl modified nucleotide
  modified_base 4: mod_base = OTHER; note = 2'-O-methyl modified nucleotide
  modified_base 11: mod_base = OTHER; note = 2'-O-methyl modified nucleotide
  modified_base 13: mod_base = OTHER; note = 2'-O-methyl modified nucleotide
  modified_base 23: mod_base = OTHER; note = 2'-O-methyl modified nucleotide
  modified_base 25: mod_base = OTHER; note = 2'-O-methyl modified nucleotide
  modified_base 26: mod_base = OTHER; note = 2'-O-methyl modified nucleotide
  modified_base 27: mod_base = OTHER; note = 2'-O-methyl modified nucleotide
ccacttctcctccaacatttgtcactt

SEQ ID NO: 1199 - RNA, 27 nt, synthetic construct
  source 1..27: mol_type = other RNA
  modified_base 1: mod_base = OTHER; note = 2'-O-methyl modified nucleotide
  modified_base 2: mod_base = OTHER; note = 2'-O-methyl modified nucleotide
  modified_base 3: mod_base = OTHER; note = 2'-O-methyl modified nucleotide
  modified_base 4: mod_base = OTHER; note = 2'-O-methyl modified nucleotide
  modified_base 11: mod_base = OTHER; note = 2'-O-methyl modified nucleotide
  modified_base 13: mod_base = OTHER; note = 2'-O-methyl modified nucleotide
  modified_base 23: mod_base = OTHER; note = 2'-O-methyl modified nucleotide
  modified_base 25: mod_base = OTHER; note = 2'-O-methyl modified nucleotide
  modified_base 26: mod_base = OTHER; note = 2'-O-methyl modified nucleotide
  modified_base 27: mod_base = OTHER; note = 2'-O-methyl modified nucleotide
accactgctcctccaacatttgtcact

SEQ ID NO: 1200 - RNA, 27 nt, synthetic construct
  source 1..27: mol_type = other RNA
  modified_base 1: mod_base = OTHER; note = 2'-O-methyl modified nucleotide
  modified_base 2: mod_base = OTHER; note = 2'-O-methyl modified nucleotide
  modified_base 3: mod_base = OTHER; note = 2'-O-methyl modified nucleotide
  modified_base 4: mod_base = OTHER; note = 2'-O-methyl modified nucleotide
  modified_base 11: mod_base = OTHER; note = 2'-O-methyl modified nucleotide
  modified_base 13: mod_base = OTHER; note = 2'-O-methyl modified nucleotide
  modified_base 23: mod_base = OTHER; note = 2'-O-methyl modified nucleotide
  modified_base 25: mod_base = OTHER; note = 2'-O-methyl modified nucleotide
  modified_base 26: mod_base = OTHER; note = 2'-O-methyl modified nucleotide
  modified_base 27: mod_base = OTHER; note = 2'-O-methyl modified nucleotide
gcacattggaactgagcacttgtacag

SEQ ID NO: 1201 - RNA, 27 nt, synthetic construct
  source 1..27: mol_type = other RNA
  modified_base 1: mod_base = OTHER; note = 2'-O-methyl modified nucleotide
  modified_base 2: mod_base = OTHER; note = 2'-O-methyl modified nucleotide
  modified_base 3: mod_base = OTHER; note = 2'-O-methyl modified nucleotide
  modified_base 4: mod_base = OTHER; note = 2'-O-methyl modified nucleotide
  modified_base 11: mod_base = OTHER; note = 2'-O-methyl modified nucleotide
  modified_base 13: mod_base = OTHER; note = 2'-O-methyl modified nucleotide
  modified_base 23: mod_base = OTHER; note = 2'-O-methyl modified nucleotide
  modified_base 25: mod_base = OTHER; note = 2'-O-methyl modified nucleotide
  modified_base 26: mod_base = OTHER; note = 2'-O-methyl modified nucleotide
  modified_base 27: mod_base = OTHER; note = 2'-O-methyl modified nucleotide
ggcactttggaactgagcacttgtaca

SEQ ID NO: 1202 - RNA, 27 nt, synthetic construct
  source 1..27: mol_type = other RNA
  modified_base 1: mod_base = OTHER; note = 2'-O-methyl modified nucleotide
  modified_base 2: mod_base = OTHER; note = 2'-O-methyl modified nucleotide
  modified_base 3: mod_base = OTHER; note = 2'-O-methyl modified nucleotide
  modified_base 4: mod_base = OTHER; note = 2'-O-methyl modified nucleotide
  modified_base 11: mod_base = OTHER; note = 2'-O-methyl modified nucleotide
  modified_base 13: mod_base = OTHER; note = 2'-O-methyl modified nucleotide
  modified_base 23: mod_base = OTHER; note = 2'-O-methyl modified nucleotide
  modified_base 25: mod_base = OTHER; note = 2'-O-methyl modified nucleotide
  modified_base 26: mod_base = OTHER; note = 2'-O-methyl modified nucleotide
  modified_base 27: mod_base = OTHER; note = 2'-O-methyl modified nucleotide
gggcatattggaactgagcacttgtac

SEQ ID NO: 1203 - RNA, 27 nt, synthetic construct
  source 1..27: mol_type = other RNA
  modified_base 1: mod_base = OTHER; note = 2'-O-methyl modified nucleotide
  modified_base 2: mod_base = OTHER; note = 2'-O-methyl modified nucleotide
  modified_base 3: mod_base = OTHER; note = 2'-O-methyl modified nucleotide
  modified_base 4: mod_base = OTHER; note = 2'-O-methyl modified nucleotide
  modified_base 11: mod_base = OTHER; note = 2'-O-methyl modified nucleotide
  modified_base 13: mod_base = OTHER; note = 2'-O-methyl modified nucleotide
  modified_base 23: mod_base = OTHER; note = 2'-O-methyl modified nucleotide
  modified_base 25: mod_base = OTHER; note = 2'-O-methyl modified nucleotide
  modified_base 26: mod_base = OTHER; note = 2'-O-methyl modified nucleotide
  modified_base 27: mod_base = OTHER; note = 2'-O-methyl modified nucleotide
tgggctcattggaactgagcacttgta

SEQ ID NO: 1204 - RNA, 27 nt, synthetic construct
  source 1..27: mol_type = other RNA
  modified_base 1: mod_base = OTHER; note = 2'-O-methyl modified nucleotide
  modified_base 2: mod_base = OTHER; note = 2'-O-methyl modified nucleotide
  modified_base 3: mod_base = OTHER; note = 2'-O-methyl modified nucleotide
  modified_base 4: mod_base = OTHER; note = 2'-O-methyl modified nucleotide
  modified_base 11: mod_base = OTHER; note = 2'-O-methyl modified nucleotide
  modified_base 13: mod_base = OTHER; note = 2'-O-methyl modified nucleotide
  modified_base 23: mod_base = OTHER; note = 2'-O-methyl modified nucleotide
  modified_base 25: mod_base = OTHER; note = 2'-O-methyl modified nucleotide
  modified_base 26: mod_base = OTHER; note = 2'-O-methyl modified nucleotide
  modified_base 27: mod_base = OTHER; note = 2'-O-methyl modified nucleotide
ctgggtacattggaactgagcacttgt

SEQ ID NO: 1205 - RNA, 27 nt, synthetic construct
  source 1..27: mol_type = other RNA
  modified_base 1: mod_base = OTHER; note = 2'-O-methyl modified nucleotide
  modified_base 2: mod_base = OTHER; note = 2'-O-methyl modified nucleotide
  modified_base 3: mod_base = OTHER; note = 2'-O-methyl modified nucleotide
  modified_base 4: mod_base = OTHER; note = 2'-O-methyl modified nucleotide
  modified_base 11: mod_base = OTHER; note = 2'-O-methyl modified nucleotide
  modified_base 13: mod_base = OTHER; note = 2'-O-methyl modified nucleotide
  modified_base 23: mod_base = OTHER; note = 2'-O-methyl modified nucleotide
  modified_base 25: mod_base = OTHER; note = 2'-O-methyl modified nucleotide
  modified_base 26: mod_base = OTHER; note = 2'-O-methyl modified nucleotide
  modified_base 27: mod_base = OTHER; note = 2'-O-methyl modified nucleotide
actggtcacattggaactgagcacttg

SEQ ID NO: 1206 - RNA, 27 nt, synthetic construct
  source 1..27: mol_type = other RNA
  modified_base 1: mod_base = OTHER; note = 2'-O-methyl modified nucleotide
  modified_base 2: mod_base = OTHER; note = 2'-O-methyl modified nucleotide
  modified_base 3: mod_base = OTHER; note = 2'-O-methyl modified nucleotide
  modified_base 4: mod_base = OTHER; note = 2'-O-methyl modified nucleotide
  modified_base 11: mod_base = OTHER; note = 2'-O-methyl modified nucleotide
  modified_base 13: mod_base = OTHER; note = 2'-O-methyl modified nucleotide
  modified_base 23: mod_base = OTHER; note = 2'-O-methyl modified nucleotide
  modified_base 25: mod_base = OTHER; note = 2'-O-methyl modified nucleotide
  modified_base 26: mod_base = OTHER; note = 2'-O-methyl modified nucleotide
  modified_base 27: mod_base = OTHER; note = 2'-O-methyl modified nucleotide
gactgtgcacattggaactgagcactt

SEQ ID NO: 1207 - RNA, 27 nt, synthetic construct
  source 1..27: mol_type = other RNA
  modified_base 1: mod_base = OTHER; note = 2'-O-methyl modified nucleotide
  modified_base 2: mod_base = OTHER; note = 2'-O-methyl modified nucleotide
  modified_base 3: mod_base = OTHER; note = 2'-O-methyl modified nucleotide
  modified_base 4: mod_base = OTHER; note = 2'-O-methyl modified nucleotide
  modified_base 11: mod_base = OTHER; note = 2'-O-methyl modified nucleotide
  modified_base 13: mod_base = OTHER; note = 2'-O-methyl modified nucleotide
  modified_base 23: mod_base = OTHER; note = 2'-O-methyl modified nucleotide
  modified_base 25: mod_base = OTHER; note = 2'-O-methyl modified nucleotide
  modified_base 26: mod_base = OTHER; note = 2'-O-methyl modified nucleotide
  modified_base 27: mod_base = OTHER; note = 2'-O-methyl modified nucleotide
tgacttggcacattggaactgagcact

SEQ ID NO: 1208 - RNA, 27 nt, synthetic construct
  source 1..27: mol_type = other RNA
  modified_base 1: mod_base = OTHER; note = 2'-O-methyl modified nucleotide
  modified_base 2: mod_base = OTHER; note = 2'-O-methyl modified nucleotide
  modified_base 3: mod_base = OTHER; note = 2'-O-methyl modified nucleotide
  modified_base 4: mod_base = OTHER; note = 2'-O-methyl modified nucleotide
  modified_base 11: mod_base = OTHER; note = 2'-O-methyl modified nucleotide
  modified_base 13: mod_base = OTHER; note = 2'-O-methyl modified nucleotide
  modified_base 23: mod_base = OTHER; note = 2'-O-methyl modified nucleotide
  modified_base 25: mod_base = OTHER; note = 2'-O-methyl modified nucleotide
  modified_base 26: mod_base = OTHER; note = 2'-O-methyl modified nucleotide
  modified_base 27: mod_base = OTHER; note = 2'-O-methyl modified nucleotide
atgactgggcacattggaactgagcac

SEQ ID NO: 1209 - RNA, 27 nt, synthetic construct
  source 1..27: mol_type = other RNA
  modified_base 1: mod_base = OTHER; note = 2'-O-methyl modified nucleotide
  modified_base 2: mod_base = OTHER; note = 2'-O-methyl modified nucleotide
  modified_base 3: mod_base = OTHER; note = 2'-O-methyl modified nucleotide
  modified_base 4: mod_base = OTHER; note = 2'-O-methyl modified nucleotide
  modified_base 11: mod_base = OTHER; note = 2'-O-methyl modified nucleotide
  modified_base 13: mod_base = OTHER; note = 2'-O-methyl modified nucleotide
  modified_base 23: mod_base = OTHER; note = 2'-O-methyl modified nucleotide
  modified_base 25: mod_base = OTHER; note = 2'-O-methyl modified nucleotide
  modified_base 26: mod_base = OTHER; note = 2'-O-methyl modified nucleotide
  modified_base 27: mod_base = OTHER; note = 2'-O-methyl modified nucleotide
catgattgggcacattggaactgagca

SEQ ID NO: 1210 - RNA, 27 nt, synthetic construct
  source 1..27: mol_type = other RNA
  modified_base 1: mod_base = OTHER; note = 2'-O-methyl modified nucleotide
  modified_base 2: mod_base = OTHER; note = 2'-O-methyl modified nucleotide
  modified_base 3: mod_base = OTHER; note = 2'-O-methyl modified nucleotide
  modified_base 4: mod_base = OTHER; note = 2'-O-methyl modified nucleotide
  modified_base 11: mod_base = OTHER; note = 2'-O-methyl modified nucleotide
  modified_base 13: mod_base = OTHER; note = 2'-O-methyl modified nucleotide
  modified_base 23: mod_base = OTHER; note = 2'-O-methyl modified nucleotide
  modified_base 25: mod_base = OTHER; note = 2'-O-methyl modified nucleotide
  modified_base 26: mod_base = OTHER; note = 2'-O-methyl modified nucleotide
  modified_base 27: mod_base = OTHER; note = 2'-O-methyl modified nucleotide
tcatgtctgggcacattggaactgagc

SEQ ID NO: 1211 - RNA, 27 nt, synthetic construct
  source 1..27: mol_type = other RNA
  modified_base 1: mod_base = OTHER; note = 2'-O-methyl modified nucleotide
  modified_base 2: mod_base = OTHER; note = 2'-O-methyl modified nucleotide
  modified_base 3: mod_base = OTHER; note = 2'-O-methyl modified nucleotide
  modified_base 4: mod_base = OTHER; note = 2'-O-methyl modified nucleotide
  modified_base 11: mod_base = OTHER; note = 2'-O-methyl modified nucleotide
  modified_base 13: mod_base = OTHER; note = 2'-O-methyl modified nucleotide
  modified_base 23: mod_base = OTHER; note = 2'-O-methyl modified nucleotide
  modified_base 25: mod_base = OTHER; note = 2'-O-methyl modified nucleotide
  modified_base 26: mod_base = OTHER; note = 2'-O-methyl modified nucleotide
  modified_base 27: mod_base = OTHER; note = 2'-O-methyl modified nucleotide
gtcattactgggcacattggaactgag

SEQ ID NO: 1212 - RNA, 27 nt, synthetic construct
  source 1..27: mol_type = other RNA
  modified_base 1: mod_base = OTHER; note = 2'-O-methyl modified nucleotide
  modified_base 2: mod_base = OTHER; note = 2'-O-methyl modified nucleotide
  modified_base 3: mod_base = OTHER; note = 2'-O-methyl modified nucleotide
  modified_base 4: mod_base = OTHER; note = 2'-O-methyl modified nucleotide
  modified_base 11: mod_base = OTHER; note = 2'-O-methyl modified nucleotide
  modified_base 13: mod_base = OTHER; note = 2'-O-methyl modified nucleotide
  modified_base 23: mod_base = OTHER; note = 2'-O-methyl modified nucleotide
  modified_base 25: mod_base = OTHER; note = 2'-O-methyl modified nucleotide
  modified_base 26: mod_base = OTHER; note = 2'-O-methyl modified nucleotide
  modified_base 27: mod_base = OTHER; note = 2'-O-methyl modified nucleotide
tgtcatgactgggcacattggaactga

SEQ ID NO: 1213 - RNA, 27 nt, synthetic construct
  source 1..27: mol_type = other RNA
  modified_base 1: mod_base = OTHER; note = 2'-O-methyl modified nucleotide
  modified_base 2: mod_base = OTHER; note = 2'-O-methyl modified nucleotide
  modified_base 3: mod_base = OTHER; note = 2'-O-methyl modified nucleotide
  modified_base 4: mod_base = OTHER; note = 2'-O-methyl modified nucleotide
  modified_base 11: mod_base = OTHER; note = 2'-O-methyl modified nucleotide
  modified_base 13: mod_base = OTHER; note = 2'-O-methyl modified nucleotide
  modified_base 23: mod_base = OTHER; note = 2'-O-methyl modified nucleotide
  modified_base 25: mod_base = OTHER; note = 2'-O-methyl modified nucleotide
  modified_base 26: mod_base = OTHER; note = 2'-O-methyl modified nucleotide
  modified_base 27: mod_base = OTHER; note = 2'-O-methyl modified nucleotide
atgtcttgactgggcacattggaactg

SEQ ID NO: 1214 - RNA, 27 nt, synthetic construct
  source 1..27: mol_type = other RNA
  modified_base 1: mod_base = OTHER; note = 2'-O-methyl modified nucleotide
  modified_base 2: mod_base = OTHER; note = 2'-O-methyl modified nucleotide
  modified_base 3: mod_base = OTHER; note = 2'-O-methyl modified nucleotide
  modified_base 4: mod_base = OTHER; note = 2'-O-methyl modified nucleotide
  modified_base 11: mod_base = OTHER; note = 2'-O-methyl modified nucleotide
  modified_base 13: mod_base = OTHER; note = 2'-O-methyl modified nucleotide
  modified_base 23: mod_base = OTHER; note = 2'-O-methyl modified nucleotide
  modified_base 25: mod_base = OTHER; note = 2'-O-methyl modified nucleotide
  modified_base 26: mod_base = OTHER; note = 2'-O-methyl modified nucleotide
  modified_base 27: mod_base = OTHER; note = 2'-O-methyl modified nucleotide
aatgttatgactgggcacattggaact

SEQ ID NO: 1215 - RNA, 27 nt, synthetic construct
  source 1..27: mol_type = other RNA
  modified_base 1: mod_base = OTHER; note = 2'-O-methyl modified nucleotide
  modified_base 2: mod_base = OTHER; note = 2'-O-methyl modified nucleotide
  modified_base 3: mod_base = OTHER; note = 2'-O-methyl modified nucleotide
  modified_base 4: mod_base = OTHER; note = 2'-O-methyl modified nucleotide
  modified_base 11: mod_base = OTHER; note = 2'-O-methyl modified nucleotide
  modified_base 13: mod_base = OTHER; note = 2'-O-methyl modified nucleotide
  modified_base 23: mod_base = OTHER; note = 2'-O-methyl modified nucleotide
  modified_base 25: mod_base = OTHER; note = 2'-O-methyl modified nucleotide
  modified_base 26: mod_base = OTHER; note = 2'-O-methyl modified nucleotide
  modified_base 27: mod_base = OTHER; note = 2'-O-methyl modified nucleotide
aaatgtcatgactgggcacattggaac

SEQ ID NO: 1216 - RNA, 27 nt, synthetic construct
  source 1..27: mol_type = other RNA
  modified_base 1: mod_base = OTHER; note = 2'-O-methyl modified nucleotide
  modified_base 2: mod_base = OTHER; note = 2'-O-methyl modified nucleotide
  modified_base 3: mod_base = OTHER; note = 2'-O-methyl modified nucleotide
  modified_base 4: mod_base = OTHER; note = 2'-O-methyl modified nucleotide
  modified_base 11: mod_base = OTHER; note = 2'-O-methyl modified nucleotide
  modified_base 13: mod_base = OTHER; note = 2'-O-methyl modified nucleotide
  modified_base 23: mod_base = OTHER; note = 2'-O-methyl modified nucleotide
  modified_base 25: mod_base = OTHER; note = 2'-O-methyl modified nucleotide
  modified_base 26: mod_base = OTHER; note = 2'-O-methyl modified nucleotide
  modified_base 27: mod_base = OTHER; note = 2'-O-methyl modified nucleotide
gaaatttcatgactgggcacattggaa

SEQ ID NO: 1217 - RNA, 27 nt, synthetic construct
  source 1..27: mol_type = other RNA
  modified_base 1: mod_base = OTHER; note = 2'-O-methyl modified nucleotide
  modified_base 2: mod_base = OTHER; note = 2'-O-methyl modified nucleotide
  modified_base 3: mod_base = OTHER; note = 2'-O-methyl modified nucleotide
  modified_base 4: mod_base = OTHER; note = 2'-O-methyl modified nucleotide
  modified_base 11: mod_base = OTHER; note = 2'-O-methyl modified nucleotide
  modified_base 13: mod_base = OTHER; note = 2'-O-methyl modified nucleotide
  modified_base 23: mod_base = OTHER; note = 2'-O-methyl modified nucleotide
  modified_base 25: mod_base = OTHER; note = 2'-O-methyl modified nucleotide
  modified_base 26: mod_base = OTHER; note = 2'-O-methyl modified nucleotide
  modified_base 27: mod_base = OTHER; note = 2'-O-methyl modified nucleotide
agaaatgtcatgactgggcacattgga

SEQ ID NO: 1218 - RNA, 27 nt, synthetic construct
  source 1..27: mol_type = other RNA
  modified_base 1: mod_base = OTHER; note = 2'-O-methyl modified nucleotide
  modified_base 2: mod_base = OTHER; note = 2'-O-methyl modified nucleotide
  modified_base 3: mod_base = OTHER; note = 2'-O-methyl modified nucleotide
  modified_base 4: mod_base = OTHER; note = 2'-O-methyl modified nucleotide
  modified_base 11: mod_base = OTHER; note = 2'-O-methyl modified nucleotide
  modified_base 13: mod_base = OTHER; note = 2'-O-methyl modified nucleotide
  modified_base 23: mod_base = OTHER; note = 2'-O-methyl modified nucleotide
  modified_base 25: mod_base = OTHER; note = 2'-O-methyl modified nucleotide
  modified_base 26: mod_base = OTHER; note = 2'-O-methyl modified nucleotide
  modified_base 27: mod_base = OTHER; note = 2'-O-methyl modified nucleotide
ttcaatcactgctgatggaagacttcg

SEQ ID NO: 1219 - RNA, 27 nt, synthetic construct
  source 1..27: mol_type = other RNA
  modified_base 1: mod_base = OTHER; note = 2'-O-methyl modified nucleotide
  modified_base 2: mod_base = OTHER; note = 2'-O-methyl modified nucleotide
  modified_base 3: mod_base = OTHER; note = 2'-O-methyl modified nucleotide
  modified_base 4: mod_base = OTHER; note = 2'-O-methyl modified nucleotide
  modified_base 11: mod_base = OTHER; note = 2'-O-methyl modified nucleotide
  modified_base 13: mod_base = OTHER; note = 2'-O-methyl modified nucleotide
  modified_base 23: mod_base = OTHER; note = 2'-O-methyl modified nucleotide
  modified_base 25: mod_base = OTHER; note = 2'-O-methyl modified nucleotide
  modified_base 26: mod_base = OTHER; note = 2'-O-methyl modified nucleotide
  modified_base 27: mod_base = OTHER; note = 2'-O-methyl modified nucleotide
cttcattcactgctgatggaagacttc

SEQ ID NO: 1220 - RNA, 27 nt, synthetic construct
  source 1..27: mol_type = other RNA
  modified_base 1: mod_base = OTHER; note = 2'-O-methyl modified nucleotide
  modified_base 2: mod_base = OTHER; note = 2'-O-methyl modified nucleotide
  modified_base 3: mod_base = OTHER; note = 2'-O-methyl modified nucleotide
  modified_base 4: mod_base = OTHER; note = 2'-O-methyl modified nucleotide
  modified_base 11: mod_base = OTHER; note = 2'-O-methyl modified nucleotide
  modified_base 13: mod_base = OTHER; note = 2'-O-methyl modified nucleotide
  modified_base 23: mod_base = OTHER; note = 2'-O-methyl modified nucleotide
  modified_base 25: mod_base = OTHER; note = 2'-O-methyl modified nucleotide
  modified_base 26: mod_base = OTHER; note = 2'-O-methyl modified nucleotide
  modified_base 27: mod_base = OTHER; note = 2'-O-methyl modified nucleotide
acttctatcactgctgatggaagactt

SEQ ID NO: 1221 - RNA, 27 nt, synthetic construct
  source 1..27: mol_type = other RNA
  modified_base 1: mod_base = OTHER; note = 2'-O-methyl modified nucleotide
  modified_base 2: mod_base = OTHER; note = 2'-O-methyl modified nucleotide
  modified_base 3: mod_base = OTHER; note = 2'-O-methyl modified nucleotide
  modified_base 4: mod_base = OTHER; note = 2'-O-methyl modified nucleotide
  modified_base 11: mod_base = OTHER; note = 2'-O-methyl modified nucleotide
  modified_base 13: mod_base = OTHER; note = 2'-O-methyl modified nucleotide
  modified_base 23: mod_base = OTHER; note = 2'-O-methyl modified nucleotide
  modified_base 25: mod_base = OTHER; note = 2'-O-methyl modified nucleotide
  modified_base 26: mod_base = OTHER; note = 2'-O-methyl modified nucleotide
  modified_base 27: mod_base = OTHER; note = 2'-O-methyl modified nucleotide
taagttgtagtcacttaggtgttttta

SEQ ID NO: 1222 - RNA, 27 nt, synthetic construct
  source 1..27: mol_type = other RNA
  modified_base 1: mod_base = OTHER; note = 2'-O-methyl modified nucleotide
  modified_base 2: mod_base = OTHER; note = 2'-O-methyl modified nucleotide
  modified_base 3: mod_base = OTHER; note = 2'-O-methyl modified nucleotide
  modified_base 4: mod_base = OTHER; note = 2'-O-methyl modified nucleotide
  modified_base 11: mod_base = OTHER; note = 2'-O-methyl modified nucleotide
  modified_base 13: mod_base = OTHER; note = 2'-O-methyl modified nucleotide
  modified_base 23: mod_base = OTHER; note = 2'-O-methyl modified nucleotide
  modified_base 25: mod_base = OTHER; note = 2'-O-methyl modified nucleotide
  modified_base 26: mod_base = OTHER; note = 2'-O-methyl modified nucleotide
  modified_base 27: mod_base = OTHER; note = 2'-O-methyl modified nucleotide
ataagtggtagtcacttaggtgttttt

SEQ ID NO: 1223 - RNA, 27 nt, synthetic construct
  source 1..27: mol_type = other RNA
  modified_base 1: mod_base = OTHER; note = 2'-O-methyl modified nucleotide
  modified_base 2: mod_base = OTHER; note = 2'-O-methyl modified nucleotide
  modified_base 3: mod_base = OTHER; note = 2'-O-methyl modified nucleotide
  modified_base 4: mod_base = OTHER; note = 2'-O-methyl modified nucleotide
  modified_base 11: mod_base = OTHER; note = 2'-O-methyl modified nucleotide
  modified_base 13: mod_base = OTHER; note = 2'-O-methyl modified nucleotide
  modified_base 23: mod_base = OTHER; note = 2'-O-methyl modified nucleotide
  modified_base 25: mod_base = OTHER; note = 2'-O-methyl modified nucleotide
  modified_base 26: mod_base = OTHER; note = 2'-O-methyl modified nucleotide
  modified_base 27: mod_base = OTHER; note = 2'-O-methyl modified nucleotide
aataattggtagtcacttaggtgtttt

SEQ ID NO: 1224 - RNA, 27 nt, synthetic construct
  source 1..27: mol_type = other RNA
  modified_base 1: mod_base = OTHER; note = 2'-O-methyl modified nucleotide
  modified_base 2: mod_base = OTHER; note = 2'-O-methyl modified nucleotide
  modified_base 3: mod_base = OTHER; note = 2'-O-methyl modified nucleotide
  modified_base 4: mod_base = OTHER; note = 2'-O-methyl modified nucleotide
  modified_base 11: mod_base = OTHER; note = 2'-O-methyl modified nucleotide
  modified_base 13: mod_base = OTHER; note = 2'-O-methyl modified nucleotide
  modified_base 23: mod_base = OTHER; note = 2'-O-methyl modified nucleotide
  modified_base 25: mod_base = OTHER; note = 2'-O-methyl modified nucleotide
  modified_base 26: mod_base = OTHER; note = 2'-O-methyl modified nucleotide
  modified_base 27: mod_base = OTHER; note = 2'-O-methyl modified nucleotide
aaatatgtggtagtcacttaggtgttt

SEQ ID NO: 1225 - RNA, 27 nt, synthetic construct
  source 1..27: mol_type = other RNA
  modified_base 1: mod_base = OTHER; note = 2'-O-methyl modified nucleotide
  modified_base 2: mod_base = OTHER; note = 2'-O-methyl modified nucleotide
  modified_base 3: mod_base = OTHER; note = 2'-O-methyl modified nucleotide
  modified_base 4: mod_base = OTHER; note = 2'-O-methyl modified nucleotide
  modified_base 11: mod_base = OTHER; note = 2'-O-methyl modified nucleotide
  modified_base 13: mod_base = OTHER; note = 2'-O-methyl modified nucleotide
  modified_base 23: mod_base = OTHER; note = 2'-O-methyl modified nucleotide
  modified_base 25: mod_base = OTHER; note = 2'-O-methyl modified nucleotide
  modified_base 26: mod_base = OTHER; note = 2'-O-methyl modified nucleotide
  modified_base 27: mod_base = OTHER; note = 2'-O-methyl modified nucleotide
gaaattagtggtagtcacttaggtgtt

SEQ ID NO: 1226 - RNA, 27 nt, synthetic construct
  source 1..27: mol_type = other RNA
  modified_base 1: mod_base = OTHER; note = 2'-O-methyl modified nucleotide
  modified_base 2: mod_base = OTHER; note = 2'-O-methyl modified nucleotide
  modified_base 3: mod_base = OTHER; note = 2'-O-methyl modified nucleotide
  modified_base 4: mod_base = OTHER; note = 2'-O-methyl modified nucleotide
  modified_base 11: mod_base = OTHER; note = 2'-O-methyl modified nucleotide
  modified_base 13: mod_base = OTHER; note = 2'-O-methyl modified nucleotide
  modified_base 23: mod_base = OTHER; note = 2'-O-methyl modified nucleotide
  modified_base 25: mod_base = OTHER; note = 2'-O-methyl modified nucleotide
  modified_base 26: mod_base = OTHER; note = 2'-O-methyl modified nucleotide
  modified_base 27: mod_base = OTHER; note = 2'-O-methyl modified nucleotide
agaaataagtggtagtcacttaggtgt

SEQ ID NO: 1227 - RNA, 27 nt, synthetic construct
  source 1..27: mol_type = other RNA
  modified_base 1: mod_base = OTHER; note = 2'-O-methyl modified nucleotide
  modified_base 2: mod_base = OTHER; note = 2'-O-methyl modified nucleotide
  modified_base 3: mod_base = OTHER; note = 2'-O-methyl modified nucleotide
  modified_base 4: mod_base = OTHER; note = 2'-O-methyl modified nucleotide
  modified_base 11: mod_base = OTHER; note = 2'-O-methyl modified nucleotide
  modified_base 13: mod_base = OTHER; note = 2'-O-methyl modified nucleotide
  modified_base 23: mod_base = OTHER; note = 2'-O-methyl modified nucleotide
  modified_base 25: mod_base = OTHER; note = 2'-O-methyl modified nucleotide
  modified_base 26: mod_base = OTHER; note = 2'-O-methyl modified nucleotide
  modified_base 27: mod_base = OTHER; note = 2'-O-methyl modified nucleotide
tagaattaagtggtagtcacttaggtg

SEQ ID NO: 1228 - RNA, 27 nt, synthetic construct
  source 1..27: mol_type = other RNA
  modified_base 1: mod_base = OTHER; note = 2'-O-methyl modified nucleotide
  modified_base 2: mod_base = OTHER; note = 2'-O-methyl modified nucleotide
  modified_base 3: mod_base = OTHER; note = 2'-O-methyl modified nucleotide
  modified_base 4: mod_base = OTHER; note = 2'-O-methyl modified nucleotide
  modified_base 11: mod_base = OTHER; note = 2'-O-methyl modified nucleotide
  modified_base 13: mod_base = OTHER; note = 2'-O-methyl modified nucleotide
  modified_base 23: mod_base = OTHER; note = 2'-O-methyl modified nucleotide
  modified_base 25: mod_base = OTHER; note = 2'-O-methyl modified nucleotide
  modified_base 26: mod_base = OTHER; note = 2'-O-methyl modified nucleotide
  modified_base 27: mod_base = OTHER; note = 2'-O-methyl modified nucleotide
ttagatataagtggtagtcacttaggt

SEQ ID NO: 1229 - RNA, 27 nt, synthetic construct
  source 1..27: mol_type = other RNA
  modified_base 1: mod_base = OTHER; note = 2'-O-methyl modified nucleotide
  modified_base 2: mod_base = OTHER; note = 2'-O-methyl modified nucleotide
  modified_base 3: mod_base = OTHER; note = 2'-O-methyl modified nucleotide
  modified_base 4: mod_base = OTHER; note = 2'-O-methyl modified nucleotide
  modified_base 11: mod_base = OTHER; note = 2'-O-methyl modified nucleotide
  modified_base 13: mod_base = OTHER; note = 2'-O-methyl modified nucleotide
  modified_base 23: mod_base = OTHER; note = 2'-O-methyl modified nucleotide
  modified_base 25: mod_base = OTHER; note = 2'-O-methyl modified nucleotide
  modified_base 26: mod_base = OTHER; note = 2'-O-methyl modified nucleotide
  modified_base 27: mod_base = OTHER; note = 2'-O-methyl modified nucleotide
tttagtaataagtggtagtcacttagg

SEQ ID NO: 1230 - RNA, 27 nt, synthetic construct
  source 1..27: mol_type = other RNA
  modified_base 1: mod_base = OTHER; note = 2'-O-methyl modified nucleotide
  modified_base 2: mod_base = OTHER; note = 2'-O-methyl modified nucleotide
  modified_base 3: mod_base = OTHER; note = 2'-O-methyl modified nucleotide
  modified_base 4: mod_base = OTHER; note = 2'-O-methyl modified nucleotide
  modified_base 11: mod_base = OTHER; note = 2'-O-methyl modified nucleotide
  modified_base 13: mod_base = OTHER; note = 2'-O-methyl modified nucleotide
  modified_base 23: mod_base = OTHER; note = 2'-O-methyl modified nucleotide
  modified_base 25: mod_base = OTHER; note = 2'-O-methyl modified nucleotide
  modified_base 26: mod_base = OTHER; note = 2'-O-methyl modified nucleotide
  modified_base 27: mod_base = OTHER; note = 2'-O-methyl modified nucleotide
atttataaataagtggtagtcacttag

SEQ ID NO: 1231 - RNA, 27 nt, synthetic construct
  source 1..27: mol_type = other RNA
  modified_base 1: mod_base = OTHER; note = 2'-O-methyl modified nucleotide
  modified_base 2: mod_base = OTHER; note = 2'-O-methyl modified nucleotide
  modified_base 3: mod_base = OTHER; note = 2'-O-methyl modified nucleotide
  modified_base 4: mod_base = OTHER; note = 2'-O-methyl modified nucleotide
  modified_base 11: mod_base = OTHER; note = 2'-O-methyl modified nucleotide
  modified_base 13: mod_base = OTHER; note = 2'-O-methyl modified nucleotide
  modified_base 23: mod_base = OTHER; note = 2'-O-methyl modified nucleotide
  modified_base 25: mod_base = OTHER; note = 2'-O-methyl modified nucleotide
  modified_base 26: mod_base = OTHER; note = 2'-O-methyl modified nucleotide
  modified_base 27: mod_base = OTHER; note = 2'-O-methyl modified nucleotide
gattttgaaataagtggtagtcactta

SEQ ID NO: 1232 - RNA, 27 nt, synthetic construct
  source 1..27: mol_type = other RNA
  modified_base 1: mod_base = OTHER; note = 2'-O-methyl modified nucleotide
  modified_base 2: mod_base = OTHER; note = 2'-O-methyl modified nucleotide
  modified_base 3: mod_base = OTHER; note = 2'-O-methyl modified nucleotide
  modified_base 4: mod_base = OTHER; note = 2'-O-methyl modified nucleotide
  modified_base 11: mod_base = OTHER; note = 2'-O-methyl modified nucleotide
  modified_base 13: mod_base = OTHER; note = 2'-O-methyl modified nucleotide
  modified_base 23: mod_base = OTHER; note = 2'-O-methyl modified nucleotide
  modified_base 25: mod_base = OTHER; note = 2'-O-methyl modified nucleotide
  modified_base 26: mod_base = OTHER; note = 2'-O-methyl modified nucleotide
  modified_base 27: mod_base = OTHER; note = 2'-O-methyl modified nucleotide
ggatttagaaataagtggtagtcactt

SEQ ID NO: 1233 - RNA, 27 nt, synthetic construct
  source 1..27: mol_type = other RNA
  modified_base 1: mod_base = OTHER; note = 2'-O-methyl modified nucleotide
  modified_base 2: mod_base = OTHER; note = 2'-O-methyl modified nucleotide
  modified_base 3: mod_base = OTHER; note = 2'-O-methyl modified nucleotide
  modified_base 4: mod_base = OTHER; note = 2'-O-methyl modified nucleotide
  modified_base 11: mod_base = OTHER; note = 2'-O-methyl modified nucleotide
  modified_base 13: mod_base = OTHER; note = 2'-O-methyl modified nucleotide
  modified_base 23: mod_base = OTHER; note = 2'-O-methyl modified nucleotide
  modified_base 25: mod_base = OTHER; note = 2'-O-methyl modified nucleotide
  modified_base 26: mod_base = OTHER; note = 2'-O-methyl modified nucleotide
  modified_base 27: mod_base = OTHER; note = 2'-O-methyl modified nucleotide
aggatttagaaataagtggtagtcact

SEQ ID NO: 1234 - RNA, 27 nt, synthetic construct
  source 1..27: mol_type = other RNA
  modified_base 1: mod_base = OTHER; note = 2'-O-methyl modified nucleotide
  modified_base 2: mod_base = OTHER; note = 2'-O-methyl modified nucleotide
  modified_base 3: mod_base = OTHER; note = 2'-O-methyl modified nucleotide
  modified_base 4: mod_base = OTHER; note = 2'-O-methyl modified nucleotide
  modified_base 11: mod_base = OTHER; note = 2'-O-methyl modified nucleotide
  modified_base 13: mod_base = OTHER; note = 2'-O-methyl modified nucleotide
  modified_base 23: mod_base = OTHER; note = 2'-O-methyl modified nucleotide
  modified_base 25: mod_base = OTHER; note = 2'-O-methyl modified nucleotide
  modified_base 26: mod_base = OTHER; note = 2'-O-methyl modified nucleotide
  modified_base 27: mod_base = OTHER; note = 2'-O-methyl modified nucleotide
gaggatttagaaataagtggtagtcac

SEQ ID NO: 1235 - RNA, 27 nt, synthetic construct
  source 1..27: mol_type = other RNA
  modified_base 1: mod_base = OTHER; note = 2'-O-methyl modified nucleotide
  modified_base 2: mod_base = OTHER; note = 2'-O-methyl modified nucleotide
  modified_base 3: mod_base = OTHER; note = 2'-O-methyl modified nucleotide
  modified_base 4: mod_base = OTHER; note = 2'-O-methyl modified nucleotide
  modified_base 11: mod_base = OTHER; note = 2'-O-methyl modified nucleotide
  modified_base 13: mod_base = OTHER; note = 2'-O-methyl modified nucleotide
  modified_base 23: mod_base = OTHER; note = 2'-O-methyl modified nucleotide
  modified_base 25: mod_base = OTHER; note = 2'-O-methyl modified nucleotide
  modified_base 26: mod_base = OTHER; note = 2'-O-methyl modified nucleotide
  modified_base 27: mod_base = OTHER; note = 2'-O-methyl modified nucleotide
tgaggttttagaaataagtggtagtca

SEQ ID NO: 1236 - RNA, 27 nt, synthetic construct
  source 1..27: mol_type = other RNA
  modified_base 1: mod_base = OTHER; note = 2'-O-methyl modified nucleotide
  modified_base 2: mod_base = OTHER; note = 2'-O-methyl modified nucleotide
  modified_base 3: mod_base = OTHER; note = 2'-O-methyl modified nucleotide
  modified_base 4: mod_base = OTHER; note = 2'-O-methyl modified nucleotide
  modified_base 11: mod_base = OTHER; note = 2'-O-methyl modified nucleotide
  modified_base 13: mod_base = OTHER; note = 2'-O-methyl modified nucleotide
  modified_base 23: mod_base = OTHER; note = 2'-O-methyl modified nucleotide
  modified_base 25: mod_base = OTHER; note = 2'-O-methyl modified nucleotide
  modified_base 26: mod_base = OTHER; note = 2'-O-methyl modified nucleotide
  modified_base 27: mod_base = OTHER; note = 2'-O-methyl modified nucleotide
gtgagtatttagaaataagtggtagtc

SEQ ID NO: 1237 - RNA, 27 nt, synthetic construct
  source 1..27: mol_type = other RNA
  modified_base 1: mod_base = OTHER; note = 2'-O-methyl modified nucleotide
  modified_base 2: mod_base = OTHER; note = 2'-O-methyl modified nucleotide
  modified_base 3: mod_base = OTHER; note = 2'-O-methyl modified nucleotide
  modified_base 4: mod_base = OTHER; note = 2'-O-methyl modified nucleotide
  modified_base 11: mod_base = OTHER; note = 2'-O-methyl modified nucleotide
  modified_base 13: mod_base = OTHER; note = 2'-O-methyl modified nucleotide
  modified_base 23: mod_base = OTHER; note = 2'-O-methyl modified nucleotide
  modified_base 25: mod_base = OTHER; note = 2'-O-methyl modified nucleotide
  modified_base 26: mod_base = OTHER; note = 2'-O-methyl modified nucleotide
  modified_base 27: mod_base = OTHER; note = 2'-O-methyl modified nucleotide
agtgatgatttagaaataagtggtagt

SEQ ID NO: 1238 - RNA, 27 nt, synthetic construct
  source 1..27: mol_type = other RNA
  modified_base 1: mod_base = OTHER; note = 2'-O-methyl modified nucleotide
  modified_base 2: mod_base = OTHER; note = 2'-O-methyl modified nucleotide
  modified_base 3: mod_base = OTHER; note = 2'-O-methyl modified nucleotide
  modified_base 4: mod_base = OTHER; note = 2'-O-methyl modified nucleotide
  modified_base 11: mod_base = OTHER; note = 2'-O-methyl modified nucleotide
  modified_base 13: mod_base = OTHER; note = 2'-O-methyl modified nucleotide
  modified_base 23: mod_base = OTHER; note = 2'-O-methyl modified nucleotide
  modified_base 25: mod_base = OTHER; note = 2'-O-methyl modified nucleotide
  modified_base 26: mod_base = OTHER; note = 2'-O-methyl modified nucleotide
  modified_base 27: mod_base = OTHER; note = 2'-O-methyl modified nucleotide
ttatatatattaacaaatttcacaata

SEQ ID NO: 1239 - RNA, 27 nt, synthetic construct
  source 1..27: mol_type = other RNA
  modified_base 1: mod_base = OTHER; note = 2'-O-methyl modified nucleotide
  modified_base 2: mod_base = OTHER; note = 2'-O-methyl modified nucleotide
  modified_base 3: mod_base = OTHER; note = 2'-O-methyl modified nucleotide
  modified_base 4: mod_base = OTHER; note = 2'-O-methyl modified nucleotide
  modified_base 11: mod_base = OTHER; note = 2'-O-methyl modified nucleotide
  modified_base 13: mod_base = OTHER; note = 2'-O-methyl modified nucleotide
  modified_base 23: mod_base = OTHER; note = 2'-O-methyl modified nucleotide
  modified_base 25: mod_base = OTHER; note = 2'-O-methyl modified nucleotide
  modified_base 26: mod_base = OTHER; note = 2'-O-methyl modified nucleotide
  modified_base 27: mod_base = OTHER; note = 2'-O-methyl modified nucleotide
attatttatattaacaaatttcacaat

SEQ ID NO: 1240 - RNA, 27 nt, synthetic construct
  source 1..27: mol_type = other RNA
  modified_base 1: mod_base = OTHER; note = 2'-O-methyl modified nucleotide
  modified_base 2: mod_base = OTHER; note = 2'-O-methyl modified nucleotide
  modified_base 3: mod_base = OTHER; note = 2'-O-methyl modified nucleotide
  modified_base 4: mod_base = OTHER; note = 2'-O-methyl modified nucleotide
  modified_base 11: mod_base = OTHER; note = 2'-O-methyl modified nucleotide
  modified_base 13: mod_base = OTHER; note = 2'-O-methyl modified nucleotide
  modified_base 23: mod_base = OTHER; note = 2'-O-methyl modified nucleotide
  modified_base 25: mod_base = OTHER; note = 2'-O-methyl modified nucleotide
  modified_base 26: mod_base = OTHER; note = 2'-O-methyl modified nucleotide
  modified_base 27: mod_base = OTHER; note = 2'-O-methyl modified nucleotide
tattatatatattaacaaatttcacaa

SEQ ID NO: 1241 - RNA, 27 nt, synthetic construct
  source 1..27: mol_type = other RNA
  modified_base 1: mod_base = OTHER; note = 2'-O-methyl modified nucleotide
  modified_base 2: mod_base = OTHER; note = 2'-O-methyl modified nucleotide
  modified_base 3: mod_base = OTHER; note = 2'-O-methyl modified nucleotide
  modified_base 4: mod_base = OTHER; note = 2'-O-methyl modified nucleotide
  modified_base 11: mod_base = OTHER; note = 2'-O-methyl modified nucleotide
  modified_base 13: mod_base = OTHER; note = 2'-O-methyl modified nucleotide
  modified_base 23: mod_base = OTHER; note = 2'-O-methyl modified nucleotide
  modified_base 25: mod_base = OTHER; note = 2'-O-methyl modified nucleotide
  modified_base 26: mod_base = OTHER; note = 2'-O-methyl modified nucleotide
  modified_base 27: mod_base = OTHER; note = 2'-O-methyl modified nucleotide
gtattttatatattaacaaatttcaca

SEQ ID NO: 1242 - RNA, 27 nt, synthetic construct
  source 1..27: mol_type = other RNA
  modified_base 1: mod_base = OTHER; note = 2'-O-methyl modified nucleotide
  modified_base 2: mod_base = OTHER; note = 2'-O-methyl modified nucleotide
  modified_base 3: mod_base = OTHER; note = 2'-O-methyl modified nucleotide
  modified_base 4: mod_base = OTHER; note = 2'-O-methyl modified nucleotide
  modified_base 11: mod_base = OTHER; note = 2'-O-methyl modified nucleotide
  modified_base 13: mod_base = OTHER; note = 2'-O-methyl modified nucleotide
  modified_base 23: mod_base = OTHER; note = 2'-O-methyl modified nucleotide
  modified_base 25: mod_base = OTHER; note = 2'-O-methyl modified nucleotide
  modified_base 26: mod_base = OTHER; note = 2'-O-methyl modified nucleotide
  modified_base 27: mod_base = OTHER; note = 2'-O-methyl modified nucleotide
agtattatatatattaacaaatttcac

SEQ ID NO: 1243 - RNA, 27 nt, synthetic construct
  source 1..27: mol_type = other RNA
  modified_base 1: mod_base = OTHER; note = 2'-O-methyl modified nucleotide
  modified_base 2: mod_base = OTHER; note = 2'-O-methyl modified nucleotide
  modified_base 3: mod_base = OTHER; note = 2'-O-methyl modified nucleotide
  modified_base 4: mod_base = OTHER; note = 2'-O-methyl modified nucleotide
  modified_base 11: mod_base = OTHER; note = 2'-O-methyl modified nucleotide
  modified_base 13: mod_base = OTHER; note = 2'-O-methyl modified nucleotide
  modified_base 23: mod_base = OTHER; note = 2'-O-methyl modified nucleotide
  modified_base 25: mod_base = OTHER; note = 2'-O-methyl modified nucleotide
  modified_base 26: mod_base = OTHER; note = 2'-O-methyl modified nucleotide
  modified_base 27: mod_base = OTHER; note = 2'-O-methyl modified nucleotide
tcaccttttatatacaaacacaagtga

SEQ ID NO: 1244 - RNA, 27 nt, synthetic construct
  source 1..27: mol_type = other RNA
  modified_base 1: mod_base = OTHER; note = 2'-O-methyl modified nucleotide
  modified_base 2: mod_base = OTHER; note = 2'-O-methyl modified nucleotide
  modified_base 3: mod_base = OTHER; note = 2'-O-methyl modified nucleotide
  modified_base 4: mod_base = OTHER; note = 2'-O-methyl modified nucleotide
  modified_base 11: mod_base = OTHER; note = 2'-O-methyl modified nucleotide
  modified_base 13: mod_base = OTHER; note = 2'-O-methyl modified nucleotide
  modified_base 23: mod_base = OTHER; note = 2'-O-methyl modified nucleotide
  modified_base 25: mod_base = OTHER; note = 2'-O-methyl modified nucleotide
  modified_base 26: mod_base = OTHER; note = 2'-O-methyl modified nucleotide
  modified_base 27: mod_base = OTHER; note = 2'-O-methyl modified nucleotide
ctcactatttatatacaaacacaagtg

SEQ ID NO: 1245 - RNA, 27 nt, synthetic construct
  source 1..27: mol_type = other RNA
  modified_base 1: mod_base = OTHER; note = 2'-O-methyl modified nucleotide
  modified_base 2: mod_base = OTHER; note = 2'-O-methyl modified nucleotide
  modified_base 3: mod_base = OTHER; note = 2'-O-methyl modified nucleotide
  modified_base 4: mod_base = OTHER; note = 2'-O-methyl modified nucleotide
  modified_base 11: mod_base = OTHER; note = 2'-O-methyl modified nucleotide
  modified_base 13: mod_base = OTHER; note = 2'-O-methyl modified nucleotide
  modified_base 23: mod_base = OTHER; note = 2'-O-methyl modified nucleotide
  modified_base 25: mod_base = OTHER; note = 2'-O-methyl modified nucleotide
  modified_base 26: mod_base = OTHER; note = 2'-O-methyl modified nucleotide
  modified_base 27: mod_base = OTHER; note = 2'-O-methyl modified nucleotide
tctcatcatttatatacaaacacaagt

SEQ ID NO: 1246 - RNA, 27 nt, synthetic construct
  source 1..27: mol_type = other RNA
  modified_base 1: mod_base = OTHER; note = 2'-O-methyl modified nucleotide
  modified_base 2: mod_base = OTHER; note = 2'-O-methyl modified nucleotide
  modified_base 3: mod_base = OTHER; note = 2'-O-methyl modified nucleotide
  modified_base 4: mod_base = OTHER; note = 2'-O-methyl modified nucleotide
  modified_base 11: mod_base = OTHER; note = 2'-O-methyl modified nucleotide
  modified_base 13: mod_base = OTHER; note = 2'-O-methyl modified nucleotide
  modified_base 23: mod_base = OTHER; note = 2'-O-methyl modified nucleotide
  modified_base 25: mod_base = OTHER; note = 2'-O-methyl modified nucleotide
  modified_base 26: mod_base = OTHER; note = 2'-O-methyl modified nucleotide
  modified_base 27: mod_base = OTHER; note = 2'-O-methyl modified nucleotide
ttctctccatttatatacaaacacaag

SEQ ID NO: 1247 - RNA, 27 nt, synthetic construct
  source 1..27: mol_type = other RNA
  modified_base 1: mod_base = OTHER; note = 2'-O-methyl modified nucleotide
  modified_base 2: mod_base = OTHER; note = 2'-O-methyl modified nucleotide
  modified_base 3: mod_base = OTHER; note = 2'-O-methyl modified nucleotide
  modified_base 4: mod_base = OTHER; note = 2'-O-methyl modified nucleotide
  modified_base 11: mod_base = OTHER; note = 2'-O-methyl modified nucleotide
  modified_base 13: mod_base = OTHER; note = 2'-O-methyl modified nucleotide
  modified_base 23: mod_base = OTHER; note = 2'-O-methyl modified nucleotide
  modified_base 25: mod_base = OTHER; note = 2'-O-methyl modified nucleotide
  modified_base 26: mod_base = OTHER; note = 2'-O-methyl modified nucleotide
  modified_base 27: mod_base = OTHER; note = 2'-O-methyl modified nucleotide
attcttaccatttatatacaaacacaa

SEQ ID NO: 1248 - RNA, 27 nt, synthetic construct
  source 1..27: mol_type = other RNA
  modified_base 1: mod_base = OTHER; note = 2'-O-methyl modified nucleotide
  modified_base 2: mod_base = OTHER; note = 2'-O-methyl modified nucleotide
  modified_base 3: mod_base = OTHER; note = 2'-O-methyl modified nucleotide
  modified_base 4: mod_base = OTHER; note = 2'-O-methyl modified nucleotide
  modified_base 11: mod_base = OTHER; note = 2'-O-methyl modified nucleotide
  modified_base 13: mod_base = OTHER; note = 2'-O-methyl modified nucleotide
  modified_base 23: mod_base = OTHER; note = 2'-O-methyl modified nucleotide
  modified_base 25: mod_base = OTHER; note = 2'-O-methyl modified nucleotide
  modified_base 26: mod_base = OTHER; note = 2'-O-methyl modified nucleotide
  modified_base 27: mod_base = OTHER; note = 2'-O-methyl modified nucleotide
aattctcaccatttatatacaaacaca

SEQ ID NO: 1249 - RNA, 27 nt, synthetic construct
  source 1..27: mol_type = other RNA
  modified_base 1: mod_base = OTHER; note = 2'-O-methyl modified nucleotide
  modified_base 2: mod_base = OTHER; note = 2'-O-methyl modified nucleotide
  modified_base 3: mod_base = OTHER; note = 2'-O-methyl modified nucleotide
  modified_base 4: mod_base = OTHER; note = 2'-O-methyl modified nucleotide
  modified_base 11: mod_base = OTHER; note = 2'-O-methyl modified nucleotide
  modified_base 13: mod_base = OTHER; note = 2'-O-methyl modified nucleotide
  modified_base 23: mod_base = OTHER; note = 2'-O-methyl modified nucleotide
  modified_base 25: mod_base = OTHER; note = 2'-O-methyl modified nucleotide
  modified_base 26: mod_base = OTHER; note = 2'-O-methyl modified nucleotide
  modified_base 27: mod_base = OTHER; note = 2'-O-methyl modified nucleotide
ggctattgaattcctttacaccacact

SEQ ID NO: 1250 - RNA, 27 nt, synthetic construct
  source 1..27: mol_type = other RNA
  modified_base 1: mod_base = OTHER; note = 2'-O-methyl modified nucleotide
  modified_base 2: mod_base = OTHER; note = 2'-O-methyl modified nucleotide
  modified_base 3: mod_base = OTHER; note = 2'-O-methyl modified nucleotide
  modified_base 4: mod_base = OTHER; note = 2'-O-methyl modified nucleotide
  modified_base 11: mod_base = OTHER; note = 2'-O-methyl modified nucleotide
  modified_base 13: mod_base = OTHER; note = 2'-O-methyl modified nucleotide
  modified_base 23: mod_base = OTHER; note = 2'-O-methyl modified nucleotide
  modified_base 25: mod_base = OTHER; note = 2'-O-methyl modified nucleotide
  modified_base 26: mod_base = OTHER; note = 2'-O-methyl modified nucleotide
  modified_base 27: mod_base = OTHER; note = 2'-O-methyl modified nucleotide
tggcttatgaattcctttacaccacac

SEQ ID NO: 1251 - RNA, 27 nt, synthetic construct
  source 1..27: mol_type = other RNA
  modified_base 1: mod_base = OTHER; note = 2'-O-methyl modified nucleotide
  modified_base 2: mod_base = OTHER; note = 2'-O-methyl modified nucleotide
  modified_base 3: mod_base = OTHER; note = 2'-O-methyl modified nucleotide
  modified_base 4: mod_base = OTHER; note = 2'-O-methyl modified nucleotide
  modified_base 11: mod_base = OTHER; note = 2'-O-methyl modified nucleotide
  modified_base 13: mod_base = OTHER; note = 2'-O-methyl modified nucleotide
  modified_base 23: mod_base = OTHER; note = 2'-O-methyl modified nucleotide
  modified_base 25: mod_base = OTHER; note = 2'-O-methyl modified nucleotide
  modified_base 26: mod_base = OTHER; note = 2'-O-methyl modified nucleotide
  modified_base 27: mod_base = OTHER; note = 2'-O-methyl modified nucleotide
atggctaatgaattcctttacaccaca

SEQ ID NO: 1252 - RNA, 27 nt, synthetic construct
  source 1..27: mol_type = other RNA
  modified_base 1: mod_base = OTHER; note = 2'-O-methyl modified nucleotide
  modified_base 2: mod_base = OTHER; note = 2'-O-methyl modified nucleotide
  modified_base 3: mod_base = OTHER; note = 2'-O-methyl modified nucleotide
  modified_base 4: mod_base = OTHER; note = 2'-O-methyl modified nucleotide
  modified_base 11: mod_base = OTHER; note = 2'-O-methyl modified nucleotide
  modified_base 13: mod_base = OTHER; note = 2'-O-methyl modified nucleotide
  modified_base 23: mod_base = OTHER; note = 2'-O-methyl modified nucleotide
  modified_base 25: mod_base = OTHER; note = 2'-O-methyl modified nucleotide
  modified_base 26: mod_base = OTHER; note = 2'-O-methyl modified nucleotide
  modified_base 27: mod_base = OTHER; note = 2'-O-methyl modified nucleotide
catggttaatgaattcctttacaccac

SEQ ID NO: 1253 - RNA, 27 nt, synthetic construct
  source 1..27: mol_type = other RNA
  modified_base 1: mod_base = OTHER; note = 2'-O-methyl modified nucleotide
  modified_base 2: mod_base = OTHER; note = 2'-O-methyl modified nucleotide
  modified_base 3: mod_base = OTHER; note = 2'-O-methyl modified nucleotide
  modified_base 4: mod_base = OTHER; note = 2'-O-methyl modified nucleotide
  modified_base 11: mod_base = OTHER; note = 2'-O-methyl modified nucleotide
  modified_base 13: mod_base = OTHER; note = 2'-O-methyl modified nucleotide
  modified_base 23: mod_base = OTHER; note = 2'-O-methyl modified nucleotide
  modified_base 25: mod_base = OTHER; note = 2'-O-methyl modified nucleotide
  modified_base 26: mod_base = OTHER; note = 2'-O-methyl modified nucleotide
  modified_base 27: mod_base = OTHER; note = 2'-O-methyl modified nucleotide
ccatgtctaatgaattcctttacacca

SEQ ID NO: 1254 - RNA, 27 nt, synthetic construct
  source 1..27: mol_type = other RNA
  modified_base 1: mod_base = OTHER; note = 2'-O-methyl modified nucleotide
  modified_base 2: mod_base = OTHER; note = 2'-O-methyl modified nucleotide
  modified_base 3: mod_base = OTHER; note = 2'-O-methyl modified nucleotide
  modified_base 4: mod_base = OTHER; note = 2'-O-methyl modified nucleotide
  modified_base 11: mod_base = OTHER; note = 2'-O-methyl modified nucleotide
  modified_base 13: mod_base = OTHER; note = 2'-O-methyl modified nucleotide
  modified_base 23: mod_base = OTHER; note = 2'-O-methyl modified nucleotide
  modified_base 25: mod_base = OTHER; note = 2'-O-methyl modified nucleotide
  modified_base 26: mod_base = OTHER; note = 2'-O-methyl modified nucleotide
  modified_base 27: mod_base = OTHER; note = 2'-O-methyl modified nucleotide
tccattgctaatgaattcctttacacc

SEQ ID NO: 1255 - RNA, 27 nt, synthetic construct
  source 1..27: mol_type = other RNA
  modified_base 1: mod_base = OTHER; note = 2'-O-methyl modified nucleotide
  modified_base 2: mod_base = OTHER; note = 2'-O-methyl modified nucleotide
  modified_base 3: mod_base = OTHER; note = 2'-O-methyl modified nucleotide
  modified_base 4: mod_base = OTHER; note = 2'-O-methyl modified nucleotide
  modified_base 11: mod_base = OTHER; note = 2'-O-methyl modified nucleotide
  modified_base 13: mod_base = OTHER; note = 2'-O-methyl modified nucleotide
  modified_base 23: mod_base = OTHER; note = 2'-O-methyl modified nucleotide
  modified_base 25: mod_base = OTHER; note = 2'-O-methyl modified nucleotide
  modified_base 26: mod_base = OTHER; note = 2'-O-methyl modified nucleotide
  modified_base 27: mod_base = OTHER; note = 2'-O-methyl modified nucleotide
atccatggctaatgaattcctttacac

SEQ ID NO: 1256 - RNA, 27 nt, synthetic construct
  source 1..27: mol_type = other RNA
  modified_base 1: mod_base = OTHER; note = 2'-O-methyl modified nucleotide
  modified_base 2: mod_base = OTHER; note = 2'-O-methyl modified nucleotide
  modified_base 3: mod_base = OTHER; note = 2'-O-methyl modified nucleotide
  modified_base 4: mod_base = OTHER; note = 2'-O-methyl modified nucleotide
  modified_base 11: mod_base = OTHER; note = 2'-O-methyl modified nucleotide
  modified_base 13: mod_base = OTHER; note = 2'-O-methyl modified nucleotide
  modified_base 23: mod_base = OTHER; note = 2'-O-methyl modified nucleotide
  modified_base 25: mod_base = OTHER; note = 2'-O-methyl modified nucleotide
  modified_base 26: mod_base = OTHER; note = 2'-O-methyl modified nucleotide
  modified_base 27: mod_base = OTHER; note = 2'-O-methyl modified nucleotide
catccttggctaatgaattcctttaca

SEQ ID NO: 1257 - RNA, 27 nt, synthetic construct
  source 1..27: mol_type = other RNA
  modified_base 1: mod_base = OTHER; note = 2'-O-methyl modified nucleotide
  modified_base 2: mod_base = OTHER; note = 2'-O-methyl modified nucleotide
  modified_base 3: mod_base = OTHER; note = 2'-O-methyl modified nucleotide
  modified_base 4: mod_base = OTHER; note = 2'-O-methyl modified nucleotide
  modified_base 11: mod_base = OTHER; note = 2'-O-methyl modified nucleotide
  modified_base 13: mod_base = OTHER; note = 2'-O-methyl modified nucleotide
  modified_base 23: mod_base = OTHER; note = 2'-O-methyl modified nucleotide
  modified_base 25: mod_base = OTHER; note = 2'-O-methyl modified nucleotide
  modified_base 26: mod_base = OTHER; note = 2'-O-methyl modified nucleotide
  modified_base 27: mod_base = OTHER; note = 2'-O-methyl modified nucleotide
acatctatggctaatgaattcctttac

SEQ ID NO: 1258 - RNA, 27 nt, synthetic construct
  source 1..27: mol_type = other RNA
  modified_base 1: mod_base = OTHER; note = 2'-O-methyl modified nucleotide
  modified_base 2: mod_base = OTHER; note = 2'-O-methyl modified nucleotide
  modified_base 3: mod_base = OTHER; note = 2'-O-methyl modified nucleotide
  modified_base 4: mod_base = OTHER; note = 2'-O-methyl modified nucleotide
  modified_base 11: mod_base = OTHER; note = 2'-O-methyl modified nucleotide
  modified_base 13: mod_base = OTHER; note = 2'-O-methyl modified nucleotide
  modified_base 23: mod_base = OTHER; note = 2'-O-methyl modified nucleotide
  modified_base 25: mod_base = OTHER; note = 2'-O-methyl modified nucleotide
  modified_base 26: mod_base = OTHER; note = 2'-O-methyl modified nucleotide
  modified_base 27: mod_base = OTHER; note = 2'-O-methyl modified nucleotide
tacattcatggctaatgaattccttta

SEQ ID NO: 1259 - RNA, 27 nt, synthetic construct
  source 1..27: mol_type = other RNA
  modified_base 1: mod_base = OTHER; note = 2'-O-methyl modified nucleotide
  modified_base 2: mod_base = OTHER; note = 2'-O-methyl modified nucleotide
  modified_base 3: mod_base = OTHER; note = 2'-O-methyl modified nucleotide
  modified_base 4: mod_base = OTHER; note = 2'-O-methyl modified nucleotide
  modified_base 11: mod_base = OTHER; note = 2'-O-methyl modified nucleotide
  modified_base 13: mod_base = OTHER; note = 2'-O-methyl modified nucleotide
  modified_base 23: mod_base = OTHER; note = 2'-O-methyl modified nucleotide
  modified_base 25: mod_base = OTHER; note = 2'-O-methyl modified nucleotide
  modified_base 26: mod_base = OTHER; note = 2'-O-methyl modified nucleotide
  modified_base 27: mod_base = OTHER; note = 2'-O-methyl modified nucleotide
atacatccatggctaatgaattccttt

SEQ ID NO: 1260 - RNA, 27 nt, synthetic construct
  source 1..27: mol_type = other RNA
  modified_base 1: mod_base = OTHER; note = 2'-O-methyl modified nucleotide
  modified_base 2: mod_base = OTHER; note = 2'-O-methyl modified nucleotide
  modified_base 3: mod_base = OTHER; note = 2'-O-methyl modified nucleotide
  modified_base 4: mod_base = OTHER; note = 2'-O-methyl modified nucleotide
  modified_base 11: mod_base = OTHER; note = 2'-O-methyl modified nucleotide
  modified_base 13: mod_base = OTHER; note = 2'-O-methyl modified nucleotide
  modified_base 23: mod_base = OTHER; note = 2'-O-methyl modified nucleotide
  modified_base 25: mod_base = OTHER; note = 2'-O-methyl modified nucleotide
  modified_base 26: mod_base = OTHER; note = 2'-O-methyl modified nucleotide
  modified_base 27: mod_base = OTHER; note = 2'-O-methyl modified nucleotide
aatacttccatggctaatgaattcctt

SEQ ID NO: 1261 - RNA, 27 nt, synthetic construct
  source 1..27: mol_type = other RNA
  modified_base 1: mod_base = OTHER; note = 2'-O-methyl modified nucleotide
  modified_base 2: mod_base = OTHER; note = 2'-O-methyl modified nucleotide
  modified_base 3: mod_base = OTHER; note = 2'-O-methyl modified nucleotide
  modified_base 4: mod_base = OTHER; note = 2'-O-methyl modified nucleotide
  modified_base 11: mod_base = OTHER; note = 2'-O-methyl modified nucleotide
  modified_base 13: mod_base = OTHER; note = 2'-O-methyl modified nucleotide
  modified_base 23: mod_base = OTHER; note = 2'-O-methyl modified nucleotide
  modified_base 25: mod_base = OTHER; note = 2'-O-methyl modified nucleotide
  modified_base 26: mod_base = OTHER; note = 2'-O-methyl modified nucleotide
  modified_base 27: mod_base = OTHER; note = 2'-O-methyl modified nucleotide
gaatatatccatggctaatgaattcct

SEQ ID NO: 1262 - RNA, 27 nt, synthetic construct
  source 1..27: mol_type = other RNA
  modified_base 1: mod_base = OTHER; note = 2'-O-methyl modified nucleotide
  modified_base 2: mod_base = OTHER; note = 2'-O-methyl modified nucleotide
  modified_base 3: mod_base = OTHER; note = 2'-O-methyl modified nucleotide
  modified_base 4: mod_base = OTHER; note = 2'-O-methyl modified nucleotide
  modified_base 11: mod_base = OTHER; note = 2'-O-methyl modified nucleotide
  modified_base 13: mod_base = OTHER; note = 2'-O-methyl modified nucleotide
  modified_base 23: mod_base = OTHER; note = 2'-O-methyl modified nucleotide
  modified_base 25: mod_base = OTHER; note = 2'-O-methyl modified nucleotide
  modified_base 26: mod_base = OTHER; note = 2'-O-methyl modified nucleotide
  modified_base 27: mod_base = OTHER; note = 2'-O-methyl modified nucleotide
tgaattcatccatggctaatgaattcc

SEQ ID NO: 1263 - RNA, 27 nt, synthetic construct
  source 1..27: mol_type = other RNA
  modified_base 1: mod_base = OTHER; note = 2'-O-methyl modified nucleotide
  modified_base 2: mod_base = OTHER; note = 2'-O-methyl modified nucleotide
  modified_base 3: mod_base = OTHER; note = 2'-O-methyl modified nucleotide
  modified_base 4: mod_base = OTHER; note = 2'-O-methyl modified nucleotide
  modified_base 11: mod_base = OTHER; note = 2'-O-methyl modified nucleotide
  modified_base 13: mod_base = OTHER; note = 2'-O-methyl modified nucleotide
  modified_base 23: mod_base = OTHER; note = 2'-O-methyl modified nucleotide
  modified_base 25: mod_base = OTHER; note = 2'-O-methyl modified nucleotide
  modified_base 26: mod_base = OTHER; note = 2'-O-methyl modified nucleotide
  modified_base 27: mod_base = OTHER; note = 2'-O-methyl modified nucleotide
atgaatacatccatggctaatgaattc

SEQ ID NO: 1264 - RNA, 27 nt, synthetic construct
  source 1..27: mol_type = other RNA
  modified_base 1: mod_base = OTHER; note = 2'-O-methyl modified nucleotide
  modified_base 2: mod_base = OTHER; note = 2'-O-methyl modified nucleotide
  modified_base 3: mod_base = OTHER; note = 2'-O-methyl modified nucleotide
  modified_base 4: mod_base = OTHER; note = 2'-O-methyl modified nucleotide
  modified_base 11: mod_base = OTHER; note = 2'-O-methyl modified nucleotide
  modified_base 13: mod_base = OTHER; note = 2'-O-methyl modified nucleotide
  modified_base 23: mod_base = OTHER; note = 2'-O-methyl modified nucleotide
  modified_base 25: mod_base = OTHER; note = 2'-O-methyl modified nucleotide
  modified_base 26: mod_base = OTHER; note = 2'-O-methyl modified nucleotide
  modified_base 27: mod_base = OTHER; note = 2'-O-methyl modified nucleotide
catgattacatccatggctaatgaatt

SEQ ID NO: 1265 - RNA, 27 nt, synthetic construct
  source 1..27: mol_type = other RNA
  modified_base 1: mod_base = OTHER; note = 2'-O-methyl modified nucleotide
  modified_base 2: mod_base = OTHER; note = 2'-O-methyl modified nucleotide
  modified_base 3: mod_base = OTHER; note = 2'-O-methyl modified nucleotide
  modified_base 4: mod_base = OTHER; note = 2'-O-methyl modified nucleotide
  modified_base 11: mod_base = OTHER; note = 2'-O-methyl modified nucleotide
  modified_base 13: mod_base = OTHER; note = 2'-O-methyl modified nucleotide
  modified_base 23: mod_base = OTHER; note = 2'-O-methyl modified nucleotide
  modified_base 25: mod_base = OTHER; note = 2'-O-methyl modified nucleotide
  modified_base 26: mod_base = OTHER; note = 2'-O-methyl modified nucleotide
  modified_base 27: mod_base = OTHER; note = 2'-O-methyl modified nucleotide
tcatgtatacatccatggctaatgaat

SEQ ID NO: 1266 - RNA, 27 nt, synthetic construct
  source 1..27: mol_type = other RNA
  modified_base 1: mod_base = OTHER; note = 2'-O-methyl modified nucleotide
  modified_base 2: mod_base = OTHER; note = 2'-O-methyl modified nucleotide
  modified_base 3: mod_base = OTHER; note = 2'-O-methyl modified nucleotide
  modified_base 4: mod_base = OTHER; note = 2'-O-methyl modified nucleotide
  modified_base 11: mod_base = OTHER; note = 2'-O-methyl modified nucleotide
  modified_base 13: mod_base = OTHER; note = 2'-O-methyl modified nucleotide
  modified_base 23: mod_base = OTHER; note = 2'-O-methyl modified nucleotide
  modified_base 25: mod_base = OTHER; note = 2'-O-methyl modified nucleotide
  modified_base 26: mod_base = OTHER; note = 2'-O-methyl modified nucleotide
  modified_base 27: mod_base = OTHER; note = 2'-O-methyl modified nucleotide
ttcattaatacatccatggctaatgaa

SEQ ID NO: 1267 - RNA, 27 nt, synthetic construct
  source 1..27: mol_type = other RNA
  modified_base 1: mod_base = OTHER; note = 2'-O-methyl modified nucleotide
  modified_base 2: mod_base = OTHER; note = 2'-O-methyl modified nucleotide
  modified_base 3: mod_base = OTHER; note = 2'-O-methyl modified nucleotide
  modified_base 4: mod_base = OTHER; note = 2'-O-methyl modified nucleotide
  modified_base 11: mod_base = OTHER; note = 2'-O-methyl modified nucleotide
  modified_base 13: mod_base = OTHER; note = 2'-O-methyl modified nucleotide
  modified_base 23: mod_base = OTHER; note = 2'-O-methyl modified nucleotide
  modified_base 25: mod_base = OTHER; note = 2'-O-methyl modified nucleotide
  modified_base 26: mod_base = OTHER; note = 2'-O-methyl modified nucleotide
  modified_base 27: mod_base = OTHER; note = 2'-O-methyl modified nucleotide
tttcatgaatacatccatggctaatga

SEQ ID NO: 1268 - RNA, 27 nt, synthetic construct
  source 1..27: mol_type = other RNA
  modified_base 1: mod_base = OTHER; note = 2'-O-methyl modified nucleotide
  modified_base 2: mod_base = OTHER; note = 2'-O-methyl modified nucleotide
  modified_base 3: mod_base = OTHER; note = 2'-O-methyl modified nucleotide
  modified_base 4: mod_base = OTHER; note = 2'-O-methyl modified nucleotide
  modified_base 11: mod_base = OTHER; note = 2'-O-methyl modified nucleotide
  modified_base 13: mod_base = OTHER; note = 2'-O-methyl modified nucleotide
  modified_base 23: mod_base = OTHER; note = 2'-O-methyl modified nucleotide
  modified_base 25: mod_base = OTHER; note = 2'-O-methyl modified nucleotide
  modified_base 26: mod_base = OTHER; note = 2'-O-methyl modified nucleotide
  modified_base 27: mod_base = OTHER; note = 2'-O-methyl modified nucleotide
ctttcttgaatacatccatggctaatg

SEQ ID NO: 1269 - RNA, 27 nt, synthetic construct
  source 1..27: mol_type = other RNA
  modified_base 1: mod_base = OTHER; note = 2'-O-methyl modified nucleotide
  modified_base 2: mod_base = OTHER; note = 2'-O-methyl modified nucleotide
  modified_base 3: mod_base = OTHER; note = 2'-O-methyl modified nucleotide
  modified_base 4: mod_base = OTHER; note = 2'-O-methyl modified nucleotide
  modified_base 11: mod_base = OTHER; note = 2'-O-methyl modified nucleotide
  modified_base 13: mod_base = OTHER; note = 2'-O-methyl modified nucleotide
  modified_base 23: mod_base = OTHER; note = 2'-O-methyl modified nucleotide
  modified_base 25: mod_base = OTHER; note = 2'-O-methyl modified nucleotide
  modified_base 26: mod_base = OTHER; note = 2'-O-methyl modified nucleotide
  modified_base 27: mod_base = OTHER; note = 2'-O-methyl modified nucleotide
ccttttatgaatacatccatggctaat

SEQ ID NO: 1270 - RNA, 27 nt, synthetic construct
  source 1..27: mol_type = other RNA
  modified_base 1: mod_base = OTHER; note = 2'-O-methyl modified nucleotide
  modified_base 2: mod_base = OTHER; note = 2'-O-methyl modified nucleotide
  modified_base 3: mod_base = OTHER; note = 2'-O-methyl modified nucleotide
  modified_base 4: mod_base = OTHER; note = 2'-O-methyl modified nucleotide
  modified_base 11: mod_base = OTHER; note = 2'-O-methyl modified nucleotide
  modified_base 13: mod_base = OTHER; note = 2'-O-methyl modified nucleotide
  modified_base 23: mod_base = OTHER; note = 2'-O-methyl modified nucleotide
  modified_base 25: mod_base = OTHER; note = 2'-O-methyl modified nucleotide
  modified_base 26: mod_base = OTHER; note = 2'-O-methyl modified nucleotide
  modified_base 27: mod_base = OTHER; note = 2'-O-methyl modified nucleotide
tcctttcatgaatacatccatggctaa

SEQ ID NO: 1271 - RNA, 27 nt, synthetic construct
  source 1..27: mol_type = other RNA
  modified_base 1: mod_base = OTHER; note = 2'-O-methyl modified nucleotide
  modified_base 2: mod_base = OTHER; note = 2'-O-methyl modified nucleotide
  modified_base 3: mod_base = OTHER; note = 2'-O-methyl modified nucleotide
  modified_base 4: mod_base = OTHER; note = 2'-O-methyl modified nucleotide
  modified_base 11: mod_base = OTHER; note = 2'-O-methyl modified nucleotide
  modified_base 13: mod_base = OTHER; note = 2'-O-methyl modified nucleotide
  modified_base 23: mod_base = OTHER; note = 2'-O-methyl modified nucleotide
  modified_base 25: mod_base = OTHER; note = 2'-O-methyl modified nucleotide
  modified_base 26: mod_base = OTHER; note = 2'-O-methyl modified nucleotide
  modified_base 27: mod_base = OTHER; note = 2'-O-methyl modified nucleotide
gtcctttcatgaatacatccatggcta

SEQ ID NO: 1272 - RNA, 27 nt, synthetic construct
  source 1..27: mol_type = other RNA
  modified_base 1: mod_base = OTHER; note = 2'-O-methyl modified nucleotide
  modified_base 2: mod_base = OTHER; note = 2'-O-methyl modified nucleotide
  modified_base 3: mod_base = OTHER; note = 2'-O-methyl modified nucleotide
  modified_base 4: mod_base = OTHER; note = 2'-O-methyl modified nucleotide
  modified_base 11: mod_base = OTHER; note = 2'-O-methyl modified nucleotide
  modified_base 13: mod_base = OTHER; note = 2'-O-methyl modified nucleotide
  modified_base 23: mod_base = OTHER; note = 2'-O-methyl modified nucleotide
  modified_base 25: mod_base = OTHER; note = 2'-O-methyl modified nucleotide
  modified_base 26: mod_base = OTHER; note = 2'-O-methyl modified nucleotide
  modified_base 27: mod_base = OTHER; note = 2'-O-methyl modified nucleotide
agtcctttcatgaatacatccatggct

SEQ ID NO: 1273 - RNA, 27 nt, synthetic construct
  source 1..27: mol_type = other RNA
  modified_base 1: mod_base = OTHER; note = 2'-O-methyl modified nucleotide
  modified_base 2: mod_base = OTHER; note = 2'-O-methyl modified nucleotide
  modified_base 3: mod_base = OTHER; note = 2'-O-methyl modified nucleotide
  modified_base 4: mod_base = OTHER; note = 2'-O-methyl modified nucleotide
  modified_base 11: mod_base = OTHER; note = 2'-O-methyl modified nucleotide
  modified_base 13: mod_base = OTHER; note = 2'-O-methyl modified nucleotide
  modified_base 23: mod_base = OTHER; note = 2'-O-methyl modified nucleotide
  modified_base 25: mod_base = OTHER; note = 2'-O-methyl modified nucleotide
  modified_base 26: mod_base = OTHER; note = 2'-O-methyl modified nucleotide
  modified_base 27: mod_base = OTHER; note = 2'-O-methyl modified nucleotide
aagtcttttcatgaatacatccatggc

SEQ ID NO: 1274 - RNA, 27 nt, synthetic construct
  source 1..27: mol_type = other RNA
  modified_base 1: mod_base = OTHER; note = 2'-O-methyl modified nucleotide
  modified_base 2: mod_base = OTHER; note = 2'-O-methyl modified nucleotide
  modified_base 3: mod_base = OTHER; note = 2'-O-methyl modified nucleotide
  modified_base 4: mod_base = OTHER; note = 2'-O-methyl modified nucleotide
  modified_base 11: mod_base = OTHER; note = 2'-O-methyl modified nucleotide
  modified_base 13: mod_base = OTHER; note = 2'-O-methyl modified nucleotide
  modified_base 23: mod_base = OTHER; note = 2'-O-methyl modified nucleotide
  modified_base 25: mod_base = OTHER; note = 2'-O-methyl modified nucleotide
  modified_base 26: mod_base = OTHER; note = 2'-O-methyl modified nucleotide
  modified_base 27: mod_base = OTHER; note = 2'-O-methyl modified nucleotide
aaagttctttcatgaatacatccatgg

SEQ ID NO: 1275 - RNA, 27 nt, synthetic construct
  source 1..27: mol_type = other RNA
  modified_base 1: mod_base = OTHER; note = 2'-O-methyl modified nucleotide
  modified_base 2: mod_base = OTHER; note = 2'-O-methyl modified nucleotide
  modified_base 3: mod_base = OTHER; note = 2'-O-methyl modified nucleotide
  modified_base 4: mod_base = OTHER; note = 2'-O-methyl modified nucleotide
  modified_base 11: mod_base = OTHER; note = 2'-O-methyl modified nucleotide
  modified_base 13: mod_base = OTHER; note = 2'-O-methyl modified nucleotide
  modified_base 23: mod_base = OTHER; note = 2'-O-methyl modified nucleotide
  modified_base 25: mod_base = OTHER; note = 2'-O-methyl modified nucleotide
  modified_base 26: mod_base = OTHER; note = 2'-O-methyl modified nucleotide
  modified_base 27: mod_base = OTHER; note = 2'-O-methyl modified nucleotide
gaaagtcctttcatgaatacatccatg

SEQ ID NO: 1276 - RNA, 27 nt, synthetic construct
  source 1..27: mol_type = other RNA
  modified_base 1: mod_base = OTHER; note = 2'-O-methyl modified nucleotide
  modified_base 2: mod_base = OTHER; note = 2'-O-methyl modified nucleotide
  modified_base 3: mod_base = OTHER; note = 2'-O-methyl modified nucleotide
  modified_base 4: mod_base = OTHER; note = 2'-O-methyl modified nucleotide
  modified_base 11: mod_base = OTHER; note = 2'-O-methyl modified nucleotide
  modified_base 13: mod_base = OTHER; note = 2'-O-methyl modified nucleotide
  modified_base 23: mod_base = OTHER; note = 2'-O-methyl modified nucleotide
  modified_base 25: mod_base = OTHER; note = 2'-O-methyl modified nucleotide
  modified_base 26: mod_base = OTHER; note = 2'-O-methyl modified nucleotide
  modified_base 27: mod_base = OTHER; note = 2'-O-methyl modified nucleotide
tgaaattcctttcatgaatacatccat

SEQ ID NO: 1277 - RNA, 27 nt, synthetic construct
  source 1..27: mol_type = other RNA
  modified_base 1: mod_base = OTHER; note = 2'-O-methyl modified nucleotide
  modified_base 2: mod_base = OTHER; note = 2'-O-methyl modified nucleotide
  modified_base 3: mod_base = OTHER; note = 2'-O-methyl modified nucleotide
  modified_base 4: mod_base = OTHER; note = 2'-O-methyl modified nucleotide
  modified_base 11: mod_base = OTHER; note = 2'-O-methyl modified nucleotide
  modified_base 13: mod_base = OTHER; note = 2'-O-methyl modified nucleotide
  modified_base 23: mod_base = OTHER; note = 2'-O-methyl modified nucleotide
  modified_base 25: mod_base = OTHER; note = 2'-O-methyl modified nucleotide
  modified_base 26: mod_base = OTHER; note = 2'-O-methyl modified nucleotide
  modified_base 27: mod_base = OTHER; note = 2'-O-methyl modified nucleotide
ttgaatgtcctttcatgaatacatcca

SEQ ID NO: 1278 - RNA, 27 nt, synthetic construct
  source 1..27: mol_type = other RNA
  modified_base 1: mod_base = OTHER; note = 2'-O-methyl modified nucleotide
  modified_base 2: mod_base = OTHER; note = 2'-O-methyl modified nucleotide
  modified_base 3: mod_base = OTHER; note = 2'-O-methyl modified nucleotide
  modified_base 4: mod_base = OTHER; note = 2'-O-methyl modified nucleotide
  modified_base 11: mod_base = OTHER; note = 2'-O-methyl modified nucleotide
  modified_base 13: mod_base = OTHER; note = 2'-O-methyl modified nucleotide
  modified_base 23: mod_base = OTHER; note = 2'-O-methyl modified nucleotide
  modified_base 25: mod_base = OTHER; note = 2'-O-methyl modified nucleotide
  modified_base 26: mod_base = OTHER; note = 2'-O-methyl modified nucleotide
  modified_base 27: mod_base = OTHER; note = 2'-O-methyl modified nucleotide
tttgatagtcctttcatgaatacatcc

SEQ ID NO: 1279 - RNA, 27 nt, synthetic construct
  source 1..27: mol_type = other RNA
  modified_base 1: mod_base = OTHER; note = 2'-O-methyl modified nucleotide
  modified_base 2: mod_base = OTHER; note = 2'-O-methyl modified nucleotide
  modified_base 3: mod_base = OTHER; note = 2'-O-methyl modified nucleotide
  modified_base 4: mod_base = OTHER; note = 2'-O-methyl modified nucleotide
  modified_base 11: mod_base = OTHER; note = 2'-O-methyl modified nucleotide
  modified_base 13: mod_base = OTHER; note = 2'-O-methyl modified nucleotide
  modified_base 23: mod_base = OTHER; note = 2'-O-methyl modified nucleotide
  modified_base 25: mod_base = OTHER; note = 2'-O-methyl modified nucleotide
  modified_base 26: mod_base = OTHER; note = 2'-O-methyl modified nucleotide
  modified_base 27: mod_base = OTHER; note = 2'-O-methyl modified nucleotide
ccttttaaagtcctttcatgaatacat

SEQ ID NO: 1280 - RNA, 27 nt, synthetic construct
  source 1..27: mol_type = other RNA
  modified_base 1: mod_base = OTHER; note = 2'-O-methyl modified nucleotide
  modified_base 2: mod_base = OTHER; note = 2'-O-methyl modified nucleotide
  modified_base 3: mod_base = OTHER; note = 2'-O-methyl modified nucleotide
  modified_base 4: mod_base = OTHER; note = 2'-O-methyl modified nucleotide
  modified_base 11: mod_base = OTHER; note = 2'-O-methyl modified nucleotide
  modified_base 13: mod_base = OTHER; note = 2'-O-methyl modified nucleotide
  modified_base 23: mod_base = OTHER; note = 2'-O-methyl modified nucleotide
  modified_base 25: mod_base = OTHER; note = 2'-O-methyl modified nucleotide
  modified_base 26: mod_base = OTHER; note = 2'-O-methyl modified nucleotide
  modified_base 27: mod_base = OTHER; note = 2'-O-methyl modified nucleotide
ctcttttgtctttcctgctgcttctgc

SEQ ID NO: 1281 - RNA, 27 nt, synthetic construct
  source 1..27: mol_type = other RNA
  modified_base 1: mod_base = OTHER; note = 2'-O-methyl modified nucleotide
  modified_base 2: mod_base = OTHER; note = 2'-O-methyl modified nucleotide
  modified_base 3: mod_base = OTHER; note = 2'-O-methyl modified nucleotide
  modified_base 4: mod_base = OTHER; note = 2'-O-methyl modified nucleotide
  modified_base 11: mod_base = OTHER; note = 2'-O-methyl modified nucleotide
  modified_base 13: mod_base = OTHER; note = 2'-O-methyl modified nucleotide
  modified_base 23: mod_base = OTHER; note = 2'-O-methyl modified nucleotide
  modified_base 25: mod_base = OTHER; note = 2'-O-methyl modified nucleotide
  modified_base 26: mod_base = OTHER; note = 2'-O-methyl modified nucleotide
  modified_base 27: mod_base = OTHER; note = 2'-O-methyl modified nucleotide
acaccttcttttgtctttcctgctgct

SEQ ID NO: 1282 - RNA, 27 nt, synthetic construct
  source 1..27: mol_type = other RNA
  modified_base 1: mod_base = OTHER; note = 2'-O-methyl modified nucleotide
  modified_base 2: mod_base = OTHER; note = 2'-O-methyl modified nucleotide
  modified_base 3: mod_base = OTHER; note = 2'-O-methyl modified nucleotide
  modified_base 4: mod_base = OTHER; note = 2'-O-methyl modified nucleotide
  modified_base 11: mod_base = OTHER; note = 2'-O-methyl modified nucleotide
  modified_base 13: mod_base = OTHER; note = 2'-O-methyl modified nucleotide
  modified_base 23: mod_base = OTHER; note = 2'-O-methyl modified nucleotide
  modified_base 25: mod_base = OTHER; note = 2'-O-methyl modified nucleotide
  modified_base 26: mod_base = OTHER; note = 2'-O-methyl modified nucleotide
  modified_base 27: mod_base = OTHER; note = 2'-O-methyl modified nucleotide
gaacatcctcttttgtctttcctgctg

SEQ ID NO: 1283 - RNA, 27 nt, synthetic construct
  source 1..27: mol_type = other RNA
  modified_base 1: mod_base = OTHER; note = 2'-O-methyl modified nucleotide
  modified_base 2: mod_base = OTHER; note = 2'-O-methyl modified nucleotide
  modified_base 3: mod_base = OTHER; note = 2'-O-methyl modified nucleotide
  modified_base 4: mod_base = OTHER; note = 2'-O-methyl modified nucleotide
  modified_base 11: mod_base = OTHER; note = 2'-O-methyl modified nucleotide
  modified_base 13: mod_base = OTHER; note = 2'-O-methyl modified nucleotide
  modified_base 23: mod_base = OTHER; note = 2'-O-methyl modified nucleotide
  modified_base 25: mod_base = OTHER; note = 2'-O-methyl modified nucleotide
  modified_base 26: mod_base = OTHER; note = 2'-O-methyl modified nucleotide
  modified_base 27: mod_base = OTHER; note = 2'-O-methyl modified nucleotide
tagagtacaccctcttttgtctttcct

SEQ ID NO: 1284 - RNA, 27 nt, synthetic construct
  source 1..27: mol_type = other RNA
  modified_base 1: mod_base = OTHER; note = 2'-O-methyl modified nucleotide
  modified_base 2: mod_base = OTHER; note = 2'-O-methyl modified nucleotide
  modified_base 3: mod_base = OTHER; note = 2'-O-methyl modified nucleotide
  modified_base 4: mod_base = OTHER; note = 2'-O-methyl modified nucleotide
  modified_base 11: mod_base = OTHER; note = 2'-O-methyl modified nucleotide
  modified_base 13: mod_base = OTHER; note = 2'-O-methyl modified nucleotide
  modified_base 23: mod_base = OTHER; note = 2'-O-methyl modified nucleotide
  modified_base 25: mod_base = OTHER; note = 2'-O-methyl modified nucleotide
  modified_base 26: mod_base = OTHER; note = 2'-O-methyl modified nucleotide
  modified_base 27: mod_base = OTHER; note = 2'-O-methyl modified nucleotide
atagataacaccctcttttgtctttcc

SEQ ID NO: 1285 - RNA, 27 nt, synthetic construct
  source 1..27: mol_type = other RNA
  modified_base 1: mod_base = OTHER; note = 2'-O-methyl modified nucleotide
  modified_base 2: mod_base = OTHER; note = 2'-O-methyl modified nucleotide
  modified_base 3: mod_base = OTHER; note = 2'-O-methyl modified nucleotide
  modified_base 4: mod_base = OTHER; note = 2'-O-methyl modified nucleotide
  modified_base 11: mod_base = OTHER; note = 2'-O-methyl modified nucleotide
  modified_base 13: mod_base = OTHER; note = 2'-O-methyl modified nucleotide
  modified_base 23: mod_base = OTHER; note = 2'-O-methyl modified nucleotide
  modified_base 25: mod_base = OTHER; note = 2'-O-methyl modified nucleotide
  modified_base 26: mod_base = OTHER; note = 2'-O-methyl modified nucleotide
  modified_base 27: mod_base = OTHER; note = 2'-O-methyl modified nucleotide
acatatagaacaccctcttttgtcttt

SEQ ID NO: 1286 - RNA, 27 nt, synthetic construct
  source 1..27: mol_type = other RNA
  modified_base 1: mod_base = OTHER; note = 2'-O-methyl modified nucleotide
  modified_base 2: mod_base = OTHER; note = 2'-O-methyl modified nucleotide
  modified_base 3: mod_base = OTHER; note = 2'-O-methyl modified nucleotide
  modified_base 4: mod_base = OTHER; note = 2'-O-methyl modified nucleotide
  modified_base 11: mod_base = OTHER; note = 2'-O-methyl modified nucleotide
  modified_base 13: mod_base = OTHER; note = 2'-O-methyl modified nucleotide
  modified_base 23: mod_base = OTHER; note = 2'-O-methyl modified nucleotide
  modified_base 25: mod_base = OTHER; note = 2'-O-methyl modified nucleotide
  modified_base 26: mod_base = OTHER; note = 2'-O-methyl modified nucleotide
  modified_base 27: mod_base = OTHER; note = 2'-O-methyl modified nucleotide
tacattgagaacaccctcttttgtctt

SEQ ID NO: 1287 - RNA, 27 nt, synthetic construct
  source 1..27: mol_type = other RNA
  modified_base 1: mod_base = OTHER; note = 2'-O-methyl modified nucleotide
  modified_base 2: mod_base = OTHER; note = 2'-O-methyl modified nucleotide
  modified_base 3: mod_base = OTHER; note = 2'-O-methyl modified nucleotide
  modified_base 4: mod_base = OTHER; note = 2'-O-methyl modified nucleotide
  modified_base 11: mod_base = OTHER; note = 2'-O-methyl modified nucleotide
  modified_base 13: mod_base = OTHER; note = 2'-O-methyl modified nucleotide
  modified_base 23: mod_base = OTHER; note = 2'-O-methyl modified nucleotide
  modified_base 25: mod_base = OTHER; note = 2'-O-methyl modified nucleotide
  modified_base 26: mod_base = OTHER; note = 2'-O-methyl modified nucleotide
  modified_base 27: mod_base = OTHER; note = 2'-O-methyl modified nucleotide
ggagcttacatagagaacaccctcttt

SEQ ID NO: 1288 - RNA, 27 nt, synthetic construct
  source 1..27: mol_type = other RNA
  modified_base 1: mod_base = OTHER; note = 2'-O-methyl modified nucleotide
  modified_base 2: mod_base = OTHER; note = 2'-O-methyl modified nucleotide
  modified_base 3: mod_base = OTHER; note = 2'-O-methyl modified nucleotide
  modified_base 4: mod_base = OTHER; note = 2'-O-methyl modified nucleotide
  modified_base 11: mod_base = OTHER; note = 2'-O-methyl modified nucleotide
  modified_base 13: mod_base = OTHER; note = 2'-O-methyl modified nucleotide
  modified_base 23: mod_base = OTHER; note = 2'-O-methyl modified nucleotide
  modified_base 25: mod_base = OTHER; note = 2'-O-methyl modified nucleotide
  modified_base 26: mod_base = OTHER; note = 2'-O-methyl modified nucleotide
  modified_base 27: mod_base = OTHER; note = 2'-O-methyl modified nucleotide
ttggatcctacatagagaacaccctct

SEQ ID NO: 1289 - RNA, 27 nt, synthetic construct
  source 1..27: mol_type = other RNA
  modified_base 1: mod_base = OTHER; note = 2'-O-methyl modified nucleotide
  modified_base 2: mod_base = OTHER; note = 2'-O-methyl modified nucleotide
  modified_base 3: mod_base = OTHER; note = 2'-O-methyl modified nucleotide
  modified_base 4: mod_base = OTHER; note = 2'-O-methyl modified nucleotide
  modified_base 11: mod_base = OTHER; note = 2'-O-methyl modified nucleotide
  modified_base 13: mod_base = OTHER; note = 2'-O-methyl modified nucleotide
  modified_base 23: mod_base = OTHER; note = 2'-O-methyl modified nucleotide
  modified_base 25: mod_base = OTHER; note = 2'-O-methyl modified nucleotide
  modified_base 26: mod_base = OTHER; note = 2'-O-methyl modified nucleotide
  modified_base 27: mod_base = OTHER; note = 2'-O-methyl modified nucleotide
ttttgtagcctacatagagaacaccct

SEQ ID NO: 1290 - RNA, 27 nt, synthetic construct
  source 1..27: mol_type = other RNA
  modified_base 1: mod_base = OTHER; note = 2'-O-methyl modified nucleotide
  modified_base 2: mod_base = OTHER; note = 2'-O-methyl modified nucleotide
  modified_base 3: mod_base = OTHER; note = 2'-O-methyl modified nucleotide
  modified_base 4: mod_base = OTHER; note = 2'-O-methyl modified nucleotide
  modified_base 11: mod_base = OTHER; note = 2'-O-methyl modified nucleotide
  modified_base 13: mod_base = OTHER; note = 2'-O-methyl modified nucleotide
  modified_base 23: mod_base = OTHER; note = 2'-O-methyl modified nucleotide
  modified_base 25: mod_base = OTHER; note = 2'-O-methyl modified nucleotide
  modified_base 26: mod_base = OTHER; note = 2'-O-methyl modified nucleotide
  modified_base 27: mod_base = OTHER; note = 2'-O-methyl modified nucleotide
ggttcttagtcttgatacccttcctca

SEQ ID NO: 1291 - RNA, 27 nt, synthetic construct
  source 1..27: mol_type = other RNA
  modified_base 1: mod_base = OTHER; note = 2'-O-methyl modified nucleotide
  modified_base 2: mod_base = OTHER; note = 2'-O-methyl modified nucleotide
  modified_base 3: mod_base = OTHER; note = 2'-O-methyl modified nucleotide
  modified_base 4: mod_base = OTHER; note = 2'-O-methyl modified nucleotide
  modified_base 11: mod_base = OTHER; note = 2'-O-methyl modified nucleotide
  modified_base 13: mod_base = OTHER; note = 2'-O-methyl modified nucleotide
  modified_base 23: mod_base = OTHER; note = 2'-O-methyl modified nucleotide
  modified_base 25: mod_base = OTHER; note = 2'-O-methyl modified nucleotide
  modified_base 26: mod_base = OTHER; note = 2'-O-methyl modified nucleotide
  modified_base 27: mod_base = OTHER; note = 2'-O-methyl modified nucleotide
tcaggttcgtagtcttgatacccttcc

SEQ ID NO: 1292 - RNA, 27 nt, synthetic construct
  source 1..27: mol_type = other RNA
  modified_base 1: mod_base = OTHER; note = 2'-O-methyl modified nucleotide
  modified_base 2: mod_base = OTHER; note = 2'-O-methyl modified nucleotide
  modified_base 3: mod_base = OTHER; note = 2'-O-methyl modified nucleotide
  modified_base 4: mod_base = OTHER; note = 2'-O-methyl modified nucleotide
  modified_base 11: mod_base = OTHER; note = 2'-O-methyl modified nucleotide
  modified_base 13: mod_base = OTHER; note = 2'-O-methyl modified nucleotide
  modified_base 23: mod_base = OTHER; note = 2'-O-methyl modified nucleotide
  modified_base 25: mod_base = OTHER; note = 2'-O-methyl modified nucleotide
  modified_base 26: mod_base = OTHER; note = 2'-O-methyl modified nucleotide
  modified_base 27: mod_base = OTHER; note = 2'-O-methyl modified nucleotide
ttcagtttcgtagtcttgatacccttc

SEQ ID NO: 1293 - RNA, 27 nt, synthetic construct
  source 1..27: mol_type = other RNA
  modified_base 1: mod_base = OTHER; note = 2'-O-methyl modified nucleotide
  modified_base 2: mod_base = OTHER; note = 2'-O-methyl modified nucleotide
  modified_base 3: mod_base = OTHER; note = 2'-O-methyl modified nucleotide
  modified_base 4: mod_base = OTHER; note = 2'-O-methyl modified nucleotide
  modified_base 11: mod_base = OTHER; note = 2'-O-methyl modified nucleotide
  modified_base 13: mod_base = OTHER; note = 2'-O-methyl modified nucleotide
  modified_base 23: mod_base = OTHER; note = 2'-O-methyl modified nucleotide
  modified_base 25: mod_base = OTHER; note = 2'-O-methyl modified nucleotide
  modified_base 26: mod_base = OTHER; note = 2'-O-methyl modified nucleotide
  modified_base 27: mod_base = OTHER; note = 2'-O-methyl modified nucleotide
taggcttcaggttcgtagtcttgatac

SEQ ID NO: 1294 - RNA, 27 nt, synthetic construct
  source 1..27: mol_type = other RNA
  modified_base 1: mod_base = OTHER; note = 2'-O-methyl modified nucleotide
  modified_base 2: mod_base = OTHER; note = 2'-O-methyl modified nucleotide
  modified_base 3: mod_base = OTHER; note = 2'-O-methyl modified nucleotide
  modified_base 4: mod_base = OTHER; note = 2'-O-methyl modified nucleotide
  modified_base 11: mod_base = OTHER; note = 2'-O-methyl modified nucleotide
  modified_base 13: mod_base = OTHER; note = 2'-O-methyl modified nucleotide
  modified_base 23: mod_base = OTHER; note = 2'-O-methyl modified nucleotide
  modified_base 25: mod_base = OTHER; note = 2'-O-methyl modified nucleotide
  modified_base 26: mod_base = OTHER; note = 2'-O-methyl modified nucleotide
  modified_base 27: mod_base = OTHER; note = 2'-O-methyl modified nucleotide
ttaggtttcaggttcgtagtcttgata

SEQ ID NO: 1295 - RNA, 27 nt, synthetic construct
  source 1..27: mol_type = other RNA
  modified_base 1: mod_base = OTHER; note = 2'-O-methyl modified nucleotide
  modified_base 2: mod_base = OTHER; note = 2'-O-methyl modified nucleotide
  modified_base 3: mod_base = OTHER; note = 2'-O-methyl modified nucleotide
  modified_base 4: mod_base = OTHER; note = 2'-O-methyl modified nucleotide
  modified_base 11: mod_base = OTHER; note = 2'-O-methyl modified nucleotide
  modified_base 13: mod_base = OTHER; note = 2'-O-methyl modified nucleotide
  modified_base 23: mod_base = OTHER; note = 2'-O-methyl modified nucleotide
  modified_base 25: mod_base = OTHER; note = 2'-O-methyl modified nucleotide
  modified_base 26: mod_base = OTHER; note = 2'-O-methyl modified nucleotide
  modified_base 27: mod_base = OTHER; note = 2'-O-methyl modified nucleotide
tcttatgcttcaggttcgtagtcttga

SEQ ID NO: 1296 - RNA, 27 nt, synthetic construct
  source 1..27: mol_type = other RNA
  modified_base 1: mod_base = OTHER; note = 2'-O-methyl modified nucleotide
  modified_base 2: mod_base = OTHER; note = 2'-O-methyl modified nucleotide
  modified_base 3: mod_base = OTHER; note = 2'-O-methyl modified nucleotide
  modified_base 4: mod_base = OTHER; note = 2'-O-methyl modified nucleotide
  modified_base 11: mod_base = OTHER; note = 2'-O-methyl modified nucleotide
  modified_base 13: mod_base = OTHER; note = 2'-O-methyl modified nucleotide
  modified_base 23: mod_base = OTHER; note = 2'-O-methyl modified nucleotide
  modified_base 25: mod_base = OTHER; note = 2'-O-methyl modified nucleotide
  modified_base 26: mod_base = OTHER; note = 2'-O-methyl modified nucleotide
  modified_base 27: mod_base = OTHER; note = 2'-O-methyl modified nucleotide
tttcttaggcttcaggttcgtagtctt

SEQ ID NO: 1297 - RNA, 27 nt, synthetic construct
  source 1..27: mol_type = other RNA
  modified_base 1: mod_base = OTHER; note = 2'-O-methyl modified nucleotide
  modified_base 2: mod_base = OTHER; note = 2'-O-methyl modified nucleotide
  modified_base 3: mod_base = OTHER; note = 2'-O-methyl modified nucleotide
  modified_base 4: mod_base = OTHER; note = 2'-O-methyl modified nucleotide
  modified_base 11: mod_base = OTHER; note = 2'-O-methyl modified nucleotide
  modified_base 13: mod_base = OTHER; note = 2'-O-methyl modified nucleotide
  modified_base 23: mod_base = OTHER; note = 2'-O-methyl modified nucleotide
  modified_base 25: mod_base = OTHER; note = 2'-O-methyl modified nucleotide
  modified_base 26: mod_base = OTHER; note = 2'-O-methyl modified nucleotide
  modified_base 27: mod_base = OTHER; note = 2'-O-methyl modified nucleotide
atttcttaggcttcaggttcgtagtct

SEQ ID NO: 1298 - RNA, 27 nt, synthetic construct
  source 1..27: mol_type = other RNA
  modified_base 1: mod_base = OTHER; note = 2'-O-methyl modified nucleotide
  modified_base 2: mod_base = OTHER; note = 2'-O-methyl modified nucleotide
  modified_base 3: mod_base = OTHER; note = 2'-O-methyl modified nucleotide
  modified_base 4: mod_base = OTHER; note = 2'-O-methyl modified nucleotide
  modified_base 11: mod_base = OTHER; note = 2'-O-methyl modified nucleotide
  modified_base 13: mod_base = OTHER; note = 2'-O-methyl modified nucleotide
  modified_base 23: mod_base = OTHER; note = 2'-O-methyl modified nucleotide
  modified_base 25: mod_base = OTHER; note = 2'-O-methyl modified nucleotide
  modified_base 26: mod_base = OTHER; note = 2'-O-methyl modified nucleotide
  modified_base 27: mod_base = OTHER; note = 2'-O-methyl modified nucleotide
tattttttaggcttcaggttcgtagtc

SEQ ID NO: 1299 - RNA, 27 nt, synthetic construct
  source 1..27: mol_type = other RNA
  modified_base 1: mod_base = OTHER; note = 2'-O-methyl modified nucleotide
  modified_base 2: mod_base = OTHER; note = 2'-O-methyl modified nucleotide
  modified_base 3: mod_base = OTHER; note = 2'-O-methyl modified nucleotide
  modified_base 4: mod_base = OTHER; note = 2'-O-methyl modified nucleotide
  modified_base 11: mod_base = OTHER; note = 2'-O-methyl modified nucleotide
  modified_base 13: mod_base = OTHER; note = 2'-O-methyl modified nucleotide
  modified_base 23: mod_base = OTHER; note = 2'-O-methyl modified nucleotide
  modified_base 25: mod_base = OTHER; note = 2'-O-methyl modified nucleotide
  modified_base 26: mod_base = OTHER; note = 2'-O-methyl modified nucleotide
  modified_base 27: mod_base = OTHER; note = 2'-O-methyl modified nucleotide
gatatttcttaggcttcaggttcgtag

SEQ ID NO: 1300 - RNA, 27 nt, synthetic construct
  source 1..27: mol_type = other RNA
  modified_base 1: mod_base = OTHER; note = 2'-O-methyl modified nucleotide
  modified_base 2: mod_base = OTHER; note = 2'-O-methyl modified nucleotide
  modified_base 3: mod_base = OTHER; note = 2'-O-methyl modified nucleotide
  modified_base 4: mod_base = OTHER; note = 2'-O-methyl modified nucleotide
  modified_base 11: mod_base = OTHER; note = 2'-O-methyl modified nucleotide
  modified_base 13: mod_base = OTHER; note = 2'-O-methyl modified nucleotide
  modified_base 23: mod_base = OTHER; note = 2'-O-methyl modified nucleotide
  modified_base 25: mod_base = OTHER; note = 2'-O-methyl modified nucleotide
  modified_base 26: mod_base = OTHER; note = 2'-O-methyl modified nucleotide
  modified_base 27: mod_base = OTHER; note = 2'-O-methyl modified nucleotide
agatatttcttaggcttcaggttcgta

SEQ ID NO: 1301 - RNA, 27 nt, synthetic construct
  source 1..27: mol_type = other RNA
  modified_base 1: mod_base = OTHER; note = 2'-O-methyl modified nucleotide
  modified_base 2: mod_base = OTHER; note = 2'-O-methyl modified nucleotide
  modified_base 3: mod_base = OTHER; note = 2'-O-methyl modified nucleotide
  modified_base 4: mod_base = OTHER; note = 2'-O-methyl modified nucleotide
  modified_base 11: mod_base = OTHER; note = 2'-O-methyl modified nucleotide
  modified_base 13: mod_base = OTHER; note = 2'-O-methyl modified nucleotide
  modified_base 23: mod_base = OTHER; note = 2'-O-methyl modified nucleotide
  modified_base 25: mod_base = OTHER; note = 2'-O-methyl modified nucleotide
  modified_base 26: mod_base = OTHER; note = 2'-O-methyl modified nucleotide
  modified_base 27: mod_base = OTHER; note = 2'-O-methyl modified nucleotide
aaagatatttcttaggcttcaggttcg

SEQ ID NO: 1302 - RNA, 27 nt, synthetic construct
  source 1..27: mol_type = other RNA
  modified_base 1: mod_base = OTHER; note = 2'-O-methyl modified nucleotide
  modified_base 2: mod_base = OTHER; note = 2'-O-methyl modified nucleotide
  modified_base 3: mod_base = OTHER; note = 2'-O-methyl modified nucleotide
  modified_base 4: mod_base = OTHER; note = 2'-O-methyl modified nucleotide
  modified_base 11: mod_base = OTHER; note = 2'-O-methyl modified nucleotide
  modified_base 13: mod_base = OTHER; note = 2'-O-methyl modified nucleotide
  modified_base 23: mod_base = OTHER; note = 2'-O-methyl modified nucleotide
  modified_base 25: mod_base = OTHER; note = 2'-O-methyl modified nucleotide
  modified_base 26: mod_base = OTHER; note = 2'-O-methyl modified nucleotide
  modified_base 27: mod_base = OTHER; note = 2'-O-methyl modified nucleotide
caaagttatttcttaggcttcaggttc

SEQ ID NO: 1303 - RNA, 27 nt, synthetic construct
  source 1..27: mol_type = other RNA
  modified_base 1: mod_base = OTHER; note = 2'-O-methyl modified nucleotide
  modified_base 2: mod_base = OTHER; note = 2'-O-methyl modified nucleotide
  modified_base 3: mod_base = OTHER; note = 2'-O-methyl modified nucleotide
  modified_base 4: mod_base = OTHER; note = 2'-O-methyl modified nucleotide
  modified_base 11: mod_base = OTHER; note = 2'-O-methyl modified nucleotide
  modified_base 13: mod_base = OTHER; note = 2'-O-methyl modified nucleotide
  modified_base 23: mod_base = OTHER; note = 2'-O-methyl modified nucleotide
  modified_base 25: mod_base = OTHER; note = 2'-O-methyl modified nucleotide
  modified_base 26: mod_base = OTHER; note = 2'-O-methyl modified nucleotide
  modified_base 27: mod_base = OTHER; note = 2'-O-methyl modified nucleotide
gcaaatatatttcttaggcttcaggtt

SEQ ID NO: 1304 - RNA, 27 nt, synthetic construct
  source 1..27: mol_type = other RNA
  modified_base 1: mod_base = OTHER; note = 2'-O-methyl modified nucleotide
  modified_base 2: mod_base = OTHER; note = 2'-O-methyl modified nucleotide
  modified_base 3: mod_base = OTHER; note = 2'-O-methyl modified nucleotide
  modified_base 4: mod_base = OTHER; note = 2'-O-methyl modified nucleotide
  modified_base 11: mod_base = OTHER; note = 2'-O-methyl modified nucleotide
  modified_base 13: mod_base = OTHER; note = 2'-O-methyl modified nucleotide
  modified_base 23: mod_base = OTHER; note = 2'-O-methyl modified nucleotide
  modified_base 25: mod_base = OTHER; note = 2'-O-methyl modified nucleotide
  modified_base 26: mod_base = OTHER; note = 2'-O-methyl modified nucleotide
  modified_base 27: mod_base = OTHER; note = 2'-O-methyl modified nucleotide
agcaatgatatttcttaggcttcaggt

SEQ ID NO: 1305 - RNA, 27 nt, synthetic construct
  source 1..27: mol_type = other RNA
  modified_base 1: mod_base = OTHER; note = 2'-O-methyl modified nucleotide
  modified_base 2: mod_base = OTHER; note = 2'-O-methyl modified nucleotide
  modified_base 3: mod_base = OTHER; note = 2'-O-methyl modified nucleotide
  modified_base 4: mod_base = OTHER; note = 2'-O-methyl modified nucleotide
  modified_base 11: mod_base = OTHER; note = 2'-O-methyl modified nucleotide
  modified_base 13: mod_base = OTHER; note = 2'-O-methyl modified nucleotide
  modified_base 23: mod_base = OTHER; note = 2'-O-methyl modified nucleotide
  modified_base 25: mod_base = OTHER; note = 2'-O-methyl modified nucleotide
  modified_base 26: mod_base = OTHER; note = 2'-O-methyl modified nucleotide
  modified_base 27: mod_base = OTHER; note = 2'-O-methyl modified nucleotide
gagcatagatatttcttaggcttcagg

SEQ ID NO: 1306 - RNA, 27 nt, synthetic construct
  source 1..27: mol_type = other RNA
  modified_base 1: mod_base = OTHER; note = 2'-O-methyl modified nucleotide
  modified_base 2: mod_base = OTHER; note = 2'-O-methyl modified nucleotide
  modified_base 3: mod_base = OTHER; note = 2'-O-methyl modified nucleotide
  modified_base 4: mod_base = OTHER; note = 2'-O-methyl modified nucleotide
  modified_base 11: mod_base = OTHER; note = 2'-O-methyl modified nucleotide
  modified_base 13: mod_base = OTHER; note = 2'-O-methyl modified nucleotide
  modified_base 23: mod_base = OTHER; note = 2'-O-methyl modified nucleotide
  modified_base 25: mod_base = OTHER; note = 2'-O-methyl modified nucleotide
  modified_base 26: mod_base = OTHER; note = 2'-O-methyl modified nucleotide
  modified_base 27: mod_base = OTHER; note = 2'-O-methyl modified nucleotide
actggtagcaaagatatttcttaggct

SEQ ID NO: 1307 - RNA, 27 nt, synthetic construct
  source 1..27: mol_type = other RNA
  modified_base 1: mod_base = OTHER; note = 2'-O-methyl modified nucleotide
  modified_base 2: mod_base = OTHER; note = 2'-O-methyl modified nucleotide
  modified_base 3: mod_base = OTHER; note = 2'-O-methyl modified nucleotide
  modified_base 4: mod_base = OTHER; note = 2'-O-methyl modified nucleotide
  modified_base 11: mod_base = OTHER; note = 2'-O-methyl modified nucleotide
  modified_base 13: mod_base = OTHER; note = 2'-O-methyl modified nucleotide
  modified_base 23: mod_base = OTHER; note = 2'-O-methyl modified nucleotide
  modified_base 25: mod_base = OTHER; note = 2'-O-methyl modified nucleotide
  modified_base 26: mod_base = OTHER; note = 2'-O-methyl modified nucleotide
  modified_base 27: mod_base = OTHER; note = 2'-O-methyl modified nucleotide
aactgtgagcaaagatatttcttaggc

SEQ ID NO: 1308 - RNA, 27 nt, synthetic construct
  source 1..27: mol_type = other RNA
  modified_base 1: mod_base = OTHER; note = 2'-O-methyl modified nucleotide
  modified_base 2: mod_base = OTHER; note = 2'-O-methyl modified nucleotide
  modified_base 3: mod_base = OTHER; note = 2'-O-methyl modified nucleotide
  modified_base 4: mod_base = OTHER; note = 2'-O-methyl modified nucleotide
  modified_base 11: mod_base = OTHER; note = 2'-O-methyl modified nucleotide
  modified_base 13: mod_base = OTHER; note = 2'-O-methyl modified nucleotide
  modified_base 23: mod_base = OTHER; note = 2'-O-methyl modified nucleotide
  modified_base 25: mod_base = OTHER; note = 2'-O-methyl modified nucleotide
  modified_base 26: mod_base = OTHER; note = 2'-O-methyl modified nucleotide
  modified_base 27: mod_base = OTHER; note = 2'-O-methyl modified nucleotide
agaaattgggagcaaagatatttctta

SEQ ID NO: 1309 - RNA, 27 nt, synthetic construct
  source 1..27: mol_type = other RNA
  modified_base 1: mod_base = OTHER; note = 2'-O-methyl modified nucleotide
  modified_base 2: mod_base = OTHER; note = 2'-O-methyl modified nucleotide
  modified_base 3: mod_base = OTHER; note = 2'-O-methyl modified nucleotide
  modified_base 4: mod_base = OTHER; note = 2'-O-methyl modified nucleotide
  modified_base 11: mod_base = OTHER; note = 2'-O-methyl modified nucleotide
  modified_base 13: mod_base = OTHER; note = 2'-O-methyl modified nucleotide
  modified_base 23: mod_base = OTHER; note = 2'-O-methyl modified nucleotide
  modified_base 25: mod_base = OTHER; note = 2'-O-methyl modified nucleotide
  modified_base 26: mod_base = OTHER; note = 2'-O-methyl modified nucleotide
  modified_base 27: mod_base = OTHER; note = 2'-O-methyl modified nucleotide
tcaagtaactgggagcaaagatatttc

SEQ ID NO: 1310 - RNA, 27 nt, synthetic construct
  source 1..27: mol_type = other RNA
  modified_base 1: mod_base = OTHER; note = 2'-O-methyl modified nucleotide
  modified_base 2: mod_base = OTHER; note = 2'-O-methyl modified nucleotide
  modified_base 3: mod_base = OTHER; note = 2'-O-methyl modified nucleotide
  modified_base 4: mod_base = OTHER; note = 2'-O-methyl modified nucleotide
  modified_base 11: mod_base = OTHER; note = 2'-O-methyl modified nucleotide
  modified_base 13: mod_base = OTHER; note = 2'-O-methyl modified nucleotide
  modified_base 23: mod_base = OTHER; note = 2'-O-methyl modified nucleotide
  modified_base 25: mod_base = OTHER; note = 2'-O-methyl modified nucleotide
  modified_base 26: mod_base = OTHER; note = 2'-O-methyl modified nucleotide
  modified_base 27: mod_base = OTHER; note = 2'-O-methyl modified nucleotide
ctcaataaactgggagcaaagatattt

SEQ ID NO: 1311 - RNA, 27 nt, synthetic construct
  source 1..27: mol_type = other RNA
  modified_base 1: mod_base = OTHER; note = 2'-O-methyl modified nucleotide
  modified_base 2: mod_base = OTHER; note = 2'-O-methyl modified nucleotide
  modified_base 3: mod_base = OTHER; note = 2'-O-methyl modified nucleotide
  modified_base 4: mod_base = OTHER; note = 2'-O-methyl modified nucleotide
  modified_base 11: mod_base = OTHER; note = 2'-O-methyl modified nucleotide
  modified_base 13: mod_base = OTHER; note = 2'-O-methyl modified nucleotide
  modified_base 23: mod_base = OTHER; note = 2'-O-methyl modified nucleotide
  modified_base 25: mod_base = OTHER; note = 2'-O-methyl modified nucleotide
  modified_base 26: mod_base = OTHER; note = 2'-O-methyl modified nucleotide
  modified_base 27: mod_base = OTHER; note = 2'-O-methyl modified nucleotide
tctgttagcagatctcaagaaactggg

SEQ ID NO: 1312 - RNA, 27 nt, synthetic construct
  source 1..27: mol_type = other RNA
  modified_base 1: mod_base = OTHER; note = 2'-O-methyl modified nucleotide
  modified_base 2: mod_base = OTHER; note = 2'-O-methyl modified nucleotide
  modified_base 3: mod_base = OTHER; note = 2'-O-methyl modified nucleotide
  modified_base 4: mod_base = OTHER; note = 2'-O-methyl modified nucleotide
  modified_base 11: mod_base = OTHER; note = 2'-O-methyl modified nucleotide
  modified_base 13: mod_base = OTHER; note = 2'-O-methyl modified nucleotide
  modified_base 23: mod_base = OTHER; note = 2'-O-methyl modified nucleotide
  modified_base 25: mod_base = OTHER; note = 2'-O-methyl modified nucleotide
  modified_base 26: mod_base = OTHER; note = 2'-O-methyl modified nucleotide
  modified_base 27: mod_base = OTHER; note = 2'-O-methyl modified nucleotide
cacattggaactgagcacttgtacagg

SEQ ID NO: 1313 - RNA, 27 nt, synthetic construct
  source 1..27: mol_type = other RNA
  modified_base 1: mod_base = OTHER; note = 2'-O-methyl modified nucleotide
  modified_base 2: mod_base = OTHER; note = 2'-O-methyl modified nucleotide
  modified_base 3: mod_base = OTHER; note = 2'-O-methyl modified nucleotide
  modified_base 4: mod_base = OTHER; note = 2'-O-methyl modified nucleotide
  modified_base 11: mod_base = OTHER; note = 2'-O-methyl modified nucleotide
  modified_base 13: mod_base = OTHER; note = 2'-O-methyl modified nucleotide
  modified_base 23: mod_base = OTHER; note = 2'-O-methyl modified nucleotide
  modified_base 25: mod_base = OTHER; note = 2'-O-methyl modified nucleotide
  modified_base 26: mod_base = OTHER; note = 2'-O-methyl modified nucleotide
  modified_base 27: mod_base = OTHER; note = 2'-O-methyl modified nucleotide
tgagatatgtcatgactgggcacattg

SEQ ID NO: 1314 - RNA, 27 nt, synthetic construct
  source 1..27: mol_type = other RNA
  modified_base 1: mod_base = OTHER; note = 2'-O-methyl modified nucleotide
  modified_base 2: mod_base = OTHER; note = 2'-O-methyl modified nucleotide
  modified_base 3: mod_base = OTHER; note = 2'-O-methyl modified nucleotide
  modified_base 4: mod_base = OTHER; note = 2'-O-methyl modified nucleotide
  modified_base 11: mod_base = OTHER; note = 2'-O-methyl modified nucleotide
  modified_base 13: mod_base = OTHER; note = 2'-O-methyl modified nucleotide
  modified_base 23: mod_base = OTHER; note = 2'-O-methyl modified nucleotide
  modified_base 25: mod_base = OTHER; note = 2'-O-methyl modified nucleotide
  modified_base 26: mod_base = OTHER; note = 2'-O-methyl modified nucleotide
  modified_base 27: mod_base = OTHER; note = 2'-O-methyl modified nucleotide
ttgagtaatgtcatgactgggcacatt

SEQ ID NO: 1315 - RNA, 27 nt, synthetic construct
  source 1..27: mol_type = other RNA
  modified_base 1: mod_base = OTHER; note = 2'-O-methyl modified nucleotide
  modified_base 2: mod_base = OTHER; note = 2'-O-methyl modified nucleotide
  modified_base 3: mod_base = OTHER; note = 2'-O-methyl modified nucleotide
  modified_base 4: mod_base = OTHER; note = 2'-O-methyl modified nucleotide
  modified_base 11: mod_base = OTHER; note = 2'-O-methyl modified nucleotide
  modified_base 13: mod_base = OTHER; note = 2'-O-methyl modified nucleotide
  modified_base 23: mod_base = OTHER; note = 2'-O-methyl modified nucleotide
  modified_base 25: mod_base = OTHER; note = 2'-O-methyl modified nucleotide
  modified_base 26: mod_base = OTHER; note = 2'-O-methyl modified nucleotide
  modified_base 27: mod_base = OTHER; note = 2'-O-methyl modified nucleotide
tttgataaatgtcatgactgggcacat

SEQ ID NO: 1316 - RNA, 27 nt, synthetic construct
  source 1..27: mol_type = other RNA
  modified_base 1: mod_base = OTHER; note = 2'-O-methyl modified nucleotide
  modified_base 2: mod_base = OTHER; note = 2'-O-methyl modified nucleotide
  modified_base 3: mod_base = OTHER; note = 2'-O-methyl modified nucleotide
  modified_base 4: mod_base = OTHER; note = 2'-O-methyl modified nucleotide
  modified_base 11: mod_base = OTHER; note = 2'-O-methyl modified nucleotide
  modified_base 13: mod_base = OTHER; note = 2'-O-methyl modified nucleotide
  modified_base 23: mod_base = OTHER; note = 2'-O-methyl modified nucleotide
  modified_base 25: mod_base = OTHER; note = 2'-O-methyl modified nucleotide
  modified_base 26: mod_base = OTHER; note = 2'-O-methyl modified nucleotide
  modified_base 27: mod_base = OTHER; note = 2'-O-methyl modified nucleotide
aaaactttgagaaatgtcatgactggg

SEQ ID NO: 1317 - RNA, 27 nt, synthetic construct
  source 1..27: mol_type = other RNA
  modified_base 1: mod_base = OTHER; note = 2'-O-methyl modified nucleotide
  modified_base 2: mod_base = OTHER; note = 2'-O-methyl modified nucleotide
  modified_base 3: mod_base = OTHER; note = 2'-O-methyl modified nucleotide
  modified_base 4: mod_base = OTHER; note = 2'-O-methyl modified nucleotide
  modified_base 11: mod_base = OTHER; note = 2'-O-methyl modified nucleotide
  modified_base 13: mod_base = OTHER; note = 2'-O-methyl modified nucleotide
  modified_base 23: mod_base = OTHER; note = 2'-O-methyl modified nucleotide
  modified_base 25: mod_base = OTHER; note = 2'-O-methyl modified nucleotide
  modified_base 26: mod_base = OTHER; note = 2'-O-methyl modified nucleotide
  modified_base 27: mod_base = OTHER; note = 2'-O-methyl modified nucleotide
aaaaattttgagaaatgtcatgactgg

SEQ ID NO: 1318 - RNA, 27 nt, synthetic construct
  source 1..27: mol_type = other RNA
  modified_base 1: mod_base = OTHER; note = 2'-O-methyl modified nucleotide
  modified_base 2: mod_base = OTHER; note = 2'-O-methyl modified nucleotide
  modified_base 3: mod_base = OTHER; note = 2'-O-methyl modified nucleotide
  modified_base 4: mod_base = OTHER; note = 2'-O-methyl modified nucleotide
  modified_base 11: mod_base = OTHER; note = 2'-O-methyl modified nucleotide
  modified_base 13: mod_base = OTHER; note = 2'-O-methyl modified nucleotide
  modified_base 23: mod_base = OTHER; note = 2'-O-methyl modified nucleotide
  modified_base 25: mod_base = OTHER; note = 2'-O-methyl modified nucleotide
  modified_base 26: mod_base = OTHER; note = 2'-O-methyl modified nucleotide
  modified_base 27: mod_base = OTHER; note = 2'-O-methyl modified nucleotide
taaaatctttgagaaatgtcatgactg

SEQ ID NO: 1319 - RNA, 27 nt, synthetic construct
  source 1..27: mol_type = other RNA
  modified_base 1: mod_base = OTHER; note = 2'-O-methyl modified nucleotide
  modified_base 2: mod_base = OTHER; note = 2'-O-methyl modified nucleotide
  modified_base 3: mod_base = OTHER; note = 2'-O-methyl modified nucleotide
  modified_base 4: mod_base = OTHER; note = 2'-O-methyl modified nucleotide
  modified_base 11: mod_base = OTHER; note = 2'-O-methyl modified nucleotide
  modified_base 13: mod_base = OTHER; note = 2'-O-methyl modified nucleotide
  modified_base 23: mod_base = OTHER; note = 2'-O-methyl modified nucleotide
  modified_base 25: mod_base = OTHER; note = 2'-O-methyl modified nucleotide
  modified_base 26: mod_base = OTHER; note = 2'-O-methyl modified nucleotide
  modified_base 27: mod_base = OTHER; note = 2'-O-methyl modified nucleotide
gtaaatactttgagaaatgtcatgact

SEQ ID NO: 1320 - RNA, 27 nt, synthetic construct
  source 1..27: mol_type = other RNA
  modified_base 1: mod_base = OTHER; note = 2'-O-methyl modified nucleotide
  modified_base 2: mod_base = OTHER; note = 2'-O-methyl modified nucleotide
  modified_base 3: mod_base = OTHER; note = 2'-O-methyl modified nucleotide
  modified_base 4: mod_base = OTHER; note = 2'-O-methyl modified nucleotide
  modified_base 11: mod_base = OTHER; note = 2'-O-methyl modified nucleotide
  modified_base 13: mod_base = OTHER; note = 2'-O-methyl modified nucleotide
  modified_base 23: mod_base = OTHER; note = 2'-O-methyl modified nucleotide
  modified_base 25: mod_base = OTHER; note = 2'-O-methyl modified nucleotide
  modified_base 26: mod_base = OTHER; note = 2'-O-methyl modified nucleotide
  modified_base 27: mod_base = OTHER; note = 2'-O-methyl modified nucleotide
tgtaataactttgagaaatgtcatgac

SEQ ID NO: 1321 - RNA, 27 nt, synthetic construct
  source 1..27: mol_type = other RNA
  modified_base 1: mod_base = OTHER; note = 2'-O-methyl modified nucleotide
  modified_base 2: mod_base = OTHER; note = 2'-O-methyl modified nucleotide
  modified_base 3: mod_base = OTHER; note = 2'-O-methyl modified nucleotide
  modified_base 4: mod_base = OTHER; note = 2'-O-methyl modified nucleotide
  modified_base 11: mod_base = OTHER; note = 2'-O-methyl modified nucleotide
  modified_base 13: mod_base = OTHER; note = 2'-O-methyl modified nucleotide
  modified_base 23: mod_base = OTHER; note = 2'-O-methyl modified nucleotide
  modified_base 25: mod_base = OTHER; note = 2'-O-methyl modified nucleotide
  modified_base 26: mod_base = OTHER; note = 2'-O-methyl modified nucleotide
  modified_base 27: mod_base = OTHER; note = 2'-O-methyl modified nucleotide
ctgtataaactttgagaaatgtcatga

SEQ ID NO: 1322 - RNA, 27 nt, synthetic construct
  source 1..27: mol_type = other RNA
  modified_base 1: mod_base = OTHER; note = 2'-O-methyl modified nucleotide
  modified_base 2: mod_base = OTHER; note = 2'-O-methyl modified nucleotide
  modified_base 3: mod_base = OTHER; note = 2'-O-methyl modified nucleotide
  modified_base 4: mod_base = OTHER; note = 2'-O-methyl modified nucleotide
  modified_base 11: mod_base = OTHER; note = 2'-O-methyl modified nucleotide
  modified_base 13: mod_base = OTHER; note = 2'-O-methyl modified nucleotide
  modified_base 23: mod_base = OTHER; note = 2'-O-methyl modified nucleotide
  modified_base 25: mod_base = OTHER; note = 2'-O-methyl modified nucleotide
  modified_base 26: mod_base = OTHER; note = 2'-O-methyl modified nucleotide
  modified_base 27: mod_base = OTHER; note = 2'-O-methyl modified nucleotide
actgttaaaactttgagaaatgtcatg

SEQ ID NO: 1323 - RNA, 27 nt, synthetic construct
  source 1..27: mol_type = other RNA
  modified_base 1: mod_base = OTHER; note = 2'-O-methyl modified nucleotide
  modified_base 2: mod_base = OTHER; note = 2'-O-methyl modified nucleotide
  modified_base 3: mod_base = OTHER; note = 2'-O-methyl modified nucleotide
  modified_base 4: mod_base = OTHER; note = 2'-O-methyl modified nucleotide
  modified_base 11: mod_base = OTHER; note = 2'-O-methyl modified nucleotide
  modified_base 13: mod_base = OTHER; note = 2'-O-methyl modified nucleotide
  modified_base 23: mod_base = OTHER; note = 2'-O-methyl modified nucleotide
  modified_base 25: mod_base = OTHER; note = 2'-O-methyl modified nucleotide
  modified_base 26: mod_base = OTHER; note = 2'-O-methyl modified nucleotide
  modified_base 27: mod_base = OTHER; note = 2'-O-methyl modified nucleotide
cactgtaaaaactttgagaaatgtcat

SEQ ID NO: 1324 - RNA, 27 nt, synthetic construct
  source 1..27: mol_type = other RNA
  modified_base 1: mod_base = OTHER; note = 2'-O-methyl modified nucleotide
  modified_base 2: mod_base = OTHER; note = 2'-O-methyl modified nucleotide
  modified_base 3: mod_base = OTHER; note = 2'-O-methyl modified nucleotide
  modified_base 4: mod_base = OTHER; note = 2'-O-methyl modified nucleotide
  modified_base 11: mod_base = OTHER; note = 2'-O-methyl modified nucleotide
  modified_base 13: mod_base = OTHER; note = 2'-O-methyl modified nucleotide
  modified_base 23: mod_base = OTHER; note = 2'-O-methyl modified nucleotide
  modified_base 25: mod_base = OTHER; note = 2'-O-methyl modified nucleotide
  modified_base 26: mod_base = OTHER; note = 2'-O-methyl modified nucleotide
  modified_base 27: mod_base = OTHER; note = 2'-O-methyl modified nucleotide
acactttaaaaactttgagaaatgtca

SEQ ID NO: 1325 - RNA, 27 nt, synthetic construct
  source 1..27: mol_type = other RNA
  modified_base 1: mod_base = OTHER; note = 2'-O-methyl modified nucleotide
  modified_base 2: mod_base = OTHER; note = 2'-O-methyl modified nucleotide
  modified_base 3: mod_base = OTHER; note = 2'-O-methyl modified nucleotide
  modified_base 4: mod_base = OTHER; note = 2'-O-methyl modified nucleotide
  modified_base 11: mod_base = OTHER; note = 2'-O-methyl modified nucleotide
  modified_base 13: mod_base = OTHER; note = 2'-O-methyl modified nucleotide
  modified_base 23: mod_base = OTHER; note = 2'-O-methyl modified nucleotide
  modified_base 25: mod_base = OTHER; note = 2'-O-methyl modified nucleotide
  modified_base 26: mod_base = OTHER; note = 2'-O-methyl modified nucleotide
  modified_base 27: mod_base = OTHER; note = 2'-O-methyl modified nucleotide
tacactgtaaaaactttgagaaatgtc

SEQ ID NO: 1326 - RNA, 27 nt, synthetic construct
  source 1..27: mol_type = other RNA
  modified_base 1: mod_base = OTHER; note = 2'-O-methyl modified nucleotide
  modified_base 2: mod_base = OTHER; note = 2'-O-methyl modified nucleotide
  modified_base 3: mod_base = OTHER; note = 2'-O-methyl modified nucleotide
  modified_base 4: mod_base = OTHER; note = 2'-O-methyl modified nucleotide
  modified_base 11: mod_base = OTHER; note = 2'-O-methyl modified nucleotide
  modified_base 13: mod_base = OTHER; note = 2'-O-methyl modified nucleotide
  modified_base 23: mod_base = OTHER; note = 2'-O-methyl modified nucleotide
  modified_base 25: mod_base = OTHER; note = 2'-O-methyl modified nucleotide
  modified_base 26: mod_base = OTHER; note = 2'-O-methyl modified nucleotide
  modified_base 27: mod_base = OTHER; note = 2'-O-methyl modified nucleotide
atacattgtaaaaactttgagaaatgt

SEQ ID NO: 1327 - RNA, 27 nt, synthetic construct
  source 1..27: mol_type = other RNA
  modified_base 1: mod_base = OTHER; note = 2'-O-methyl modified nucleotide
  modified_base 2: mod_base = OTHER; note = 2'-O-methyl modified nucleotide
  modified_base 3: mod_base = OTHER; note = 2'-O-methyl modified nucleotide
  modified_base 4: mod_base = OTHER; note = 2'-O-methyl modified nucleotide
  modified_base 11: mod_base = OTHER; note = 2'-O-methyl modified nucleotide
  modified_base 13: mod_base = OTHER; note = 2'-O-methyl modified nucleotide
  modified_base 23: mod_base = OTHER; note = 2'-O-methyl modified nucleotide
  modified_base 25: mod_base = OTHER; note = 2'-O-methyl modified nucleotide
  modified_base 26: mod_base = OTHER; note = 2'-O-methyl modified nucleotide
  modified_base 27: mod_base = OTHER; note = 2'-O-methyl modified nucleotide
gatactctgtaaaaactttgagaaatg

SEQ ID NO: 1328 - RNA, 27 nt, synthetic construct
  source 1..27: mol_type = other RNA
  modified_base 1: mod_base = OTHER; note = 2'-O-methyl modified nucleotide
  modified_base 2: mod_base = OTHER; note = 2'-O-methyl modified nucleotide
  modified_base 3: mod_base = OTHER; note = 2'-O-methyl modified nucleotide
  modified_base 4: mod_base = OTHER; note = 2'-O-methyl modified nucleotide
  modified_base 11: mod_base = OTHER; note = 2'-O-methyl modified nucleotide
  modified_base 13: mod_base = OTHER; note = 2'-O-methyl modified nucleotide
  modified_base 23: mod_base = OTHER; note = 2'-O-methyl modified nucleotide
  modified_base 25: mod_base = OTHER; note = 2'-O-methyl modified nucleotide
  modified_base 26: mod_base = OTHER; note = 2'-O-methyl modified nucleotide
  modified_base 27: mod_base = OTHER; note = 2'-O-methyl modified nucleotide
tcaattactgctgatggaagacttcga

SEQ ID NO: 1329 - RNA, 27 nt, synthetic construct
  source 1..27: mol_type = other RNA
  modified_base 1: mod_base = OTHER; note = 2'-O-methyl modified nucleotide
  modified_base 2: mod_base = OTHER; note = 2'-O-methyl modified nucleotide
  modified_base 3: mod_base = OTHER; note = 2'-O-methyl modified nucleotide
  modified_base 4: mod_base = OTHER; note = 2'-O-methyl modified nucleotide
  modified_base 11: mod_base = OTHER; note = 2'-O-methyl modified nucleotide
  modified_base 13: mod_base = OTHER; note = 2'-O-methyl modified nucleotide
  modified_base 23: mod_base = OTHER; note = 2'-O-methyl modified nucleotide
  modified_base 25: mod_base = OTHER; note = 2'-O-methyl modified nucleotide
  modified_base 26: mod_base = OTHER; note = 2'-O-methyl modified nucleotide
  modified_base 27: mod_base = OTHER; note = 2'-O-methyl modified nucleotide
gatacttcaatcactgctgatggaaga

SEQ ID NO: 1330 - RNA, 27 nt, synthetic construct
  source 1..27: mol_type = other RNA
  modified_base 1: mod_base = OTHER; note = 2'-O-methyl modified nucleotide
  modified_base 2: mod_base = OTHER; note = 2'-O-methyl modified nucleotide
  modified_base 3: mod_base = OTHER; note = 2'-O-methyl modified nucleotide
  modified_base 4: mod_base = OTHER; note = 2'-O-methyl modified nucleotide
  modified_base 11: mod_base = OTHER; note = 2'-O-methyl modified nucleotide
  modified_base 13: mod_base = OTHER; note = 2'-O-methyl modified nucleotide
  modified_base 23: mod_base = OTHER; note = 2'-O-methyl modified nucleotide
  modified_base 25: mod_base = OTHER; note = 2'-O-methyl modified nucleotide
  modified_base 26: mod_base = OTHER; note = 2'-O-methyl modified nucleotide
  modified_base 27: mod_base = OTHER; note = 2'-O-methyl modified nucleotide
agatatttcaatcactgctgatggaag

SEQ ID NO: 1331 - RNA, 27 nt, synthetic construct
  source 1..27: mol_type = other RNA
  modified_base 1: mod_base = OTHER; note = 2'-O-methyl modified nucleotide
  modified_base 2: mod_base = OTHER; note = 2'-O-methyl modified nucleotide
  modified_base 3: mod_base = OTHER; note = 2'-O-methyl modified nucleotide
  modified_base 4: mod_base = OTHER; note = 2'-O-methyl modified nucleotide
  modified_base 11: mod_base = OTHER; note = 2'-O-methyl modified nucleotide
  modified_base 13: mod_base = OTHER; note = 2'-O-methyl modified nucleotide
  modified_base 23: mod_base = OTHER; note = 2'-O-methyl modified nucleotide
  modified_base 25: mod_base = OTHER; note = 2'-O-methyl modified nucleotide
  modified_base 26: mod_base = OTHER; note = 2'-O-methyl modified nucleotide
  modified_base 27: mod_base = OTHER; note = 2'-O-methyl modified nucleotide
cagattcttcaatcactgctgatggaa

SEQ ID NO: 1332 - RNA, 27 nt, synthetic construct
  source 1..27: mol_type = other RNA
  modified_base 1: mod_base = OTHER; note = 2'-O-methyl modified nucleotide
  modified_base 2: mod_base = OTHER; note = 2'-O-methyl modified nucleotide
  modified_base 3: mod_base = OTHER; note = 2'-O-methyl modified nucleotide
  modified_base 4: mod_base = OTHER; note = 2'-O-methyl modified nucleotide
  modified_base 11: mod_base = OTHER; note = 2'-O-methyl modified nucleotide
  modified_base 13: mod_base = OTHER; note = 2'-O-methyl modified nucleotide
  modified_base 23: mod_base = OTHER; note = 2'-O-methyl modified nucleotide
  modified_base 25: mod_base = OTHER; note = 2'-O-methyl modified nucleotide
  modified_base 26: mod_base = OTHER; note = 2'-O-methyl modified nucleotide
  modified_base 27: mod_base = OTHER; note = 2'-O-methyl modified nucleotide
acagatacttcaatcactgctgatgga

SEQ ID NO: 1333 - RNA, 27 nt, synthetic construct
  source 1..27: mol_type = other RNA
  modified_base 1: mod_base = OTHER; note = 2'-O-methyl modified nucleotide
  modified_base 2: mod_base = OTHER; note = 2'-O-methyl modified nucleotide
  modified_base 3: mod_base = OTHER; note = 2'-O-methyl modified nucleotide
  modified_base 4: mod_base = OTHER; note = 2'-O-methyl modified nucleotide
  modified_base 11: mod_base = OTHER; note = 2'-O-methyl modified nucleotide
  modified_base 13: mod_base = OTHER; note = 2'-O-methyl modified nucleotide
  modified_base 23: mod_base = OTHER; note = 2'-O-methyl modified nucleotide
  modified_base 25: mod_base = OTHER; note = 2'-O-methyl modified nucleotide
  modified_base 26: mod_base = OTHER; note = 2'-O-methyl modified nucleotide
  modified_base 27: mod_base = OTHER; note = 2'-O-methyl modified nucleotide
tacagttacttcaatcactgctgatgg

SEQ ID NO: 1334 - RNA, 27 nt, synthetic construct
  source 1..27: mol_type = other RNA
  modified_base 1: mod_base = OTHER; note = 2'-O-methyl modified nucleotide
  modified_base 2: mod_base = OTHER; note = 2'-O-methyl modified nucleotide
  modified_base 3: mod_base = OTHER; note = 2'-O-methyl modified nucleotide
  modified_base 4: mod_base = OTHER; note = 2'-O-methyl modified nucleotide
  modified_base 11: mod_base = OTHER; note = 2'-O-methyl modified nucleotide
  modified_base 13: mod_base = OTHER; note = 2'-O-methyl modified nucleotide
  modified_base 23: mod_base = OTHER; note = 2'-O-methyl modified nucleotide
  modified_base 25: mod_base = OTHER; note = 2'-O-methyl modified nucleotide
  modified_base 26: mod_base = OTHER; note = 2'-O-methyl modified nucleotide
  modified_base 27: mod_base = OTHER; note = 2'-O-methyl modified nucleotide
gtacatatacttcaatcactgctgatg

SEQ ID NO: 1335 - RNA, 27 nt, synthetic construct
  source 1..27: mol_type = other RNA
  modified_base 1: mod_base = OTHER; note = 2'-O-methyl modified nucleotide
  modified_base 2: mod_base = OTHER; note = 2'-O-methyl modified nucleotide
  modified_base 3: mod_base = OTHER; note = 2'-O-methyl modified nucleotide
  modified_base 4: mod_base = OTHER; note = 2'-O-methyl modified nucleotide
  modified_base 11: mod_base = OTHER; note = 2'-O-methyl modified nucleotide
  modified_base 13: mod_base = OTHER; note = 2'-O-methyl modified nucleotide
  modified_base 23: mod_base = OTHER; note = 2'-O-methyl modified nucleotide
  modified_base 25: mod_base = OTHER; note = 2'-O-methyl modified nucleotide
  modified_base 26: mod_base = OTHER; note = 2'-O-methyl modified nucleotide
  modified_base 27: mod_base = OTHER; note = 2'-O-methyl modified nucleotide
ggtactgatacttcaatcactgctgat

SEQ ID NO: 1336 - RNA, 27 nt, synthetic construct
  source 1..27: mol_type = other RNA
  modified_base 1: mod_base = OTHER; note = 2'-O-methyl modified nucleotide
  modified_base 2: mod_base = OTHER; note = 2'-O-methyl modified nucleotide
  modified_base 3: mod_base = OTHER; note = 2'-O-methyl modified nucleotide
  modified_base 4: mod_base = OTHER; note = 2'-O-methyl modified nucleotide
  modified_base 11: mod_base = OTHER; note = 2'-O-methyl modified nucleotide
  modified_base 13: mod_base = OTHER; note = 2'-O-methyl modified nucleotide
  modified_base 23: mod_base = OTHER; note = 2'-O-methyl modified nucleotide
  modified_base 25: mod_base = OTHER; note = 2'-O-methyl modified nucleotide
  modified_base 26: mod_base = OTHER; note = 2'-O-methyl modified nucleotide
  modified_base 27: mod_base = OTHER; note = 2'-O-methyl modified nucleotide
aggtatagatacttcaatcactgctga

SEQ ID NO: 1337 - RNA, 27 nt, synthetic construct
  source 1..27: mol_type = other RNA
  modified_base 1: mod_base = OTHER; note = 2'-O-methyl modified nucleotide
  modified_base 2: mod_base = OTHER; note = 2'-O-methyl modified nucleotide
  modified_base 3: mod_base = OTHER; note = 2'-O-methyl modified nucleotide
  modified_base 4: mod_base = OTHER; note = 2'-O-methyl modified nucleotide
  modified_base 11: mod_base = OTHER; note = 2'-O-methyl modified nucleotide
  modified_base 13: mod_base = OTHER; note = 2'-O-methyl modified nucleotide
  modified_base 23: mod_base = OTHER; note = 2'-O-methyl modified nucleotide
  modified_base 25: mod_base = OTHER; note = 2'-O-methyl modified nucleotide
  modified_base 26: mod_base = OTHER; note = 2'-O-methyl modified nucleotide
  modified_base 27: mod_base = OTHER; note = 2'-O-methyl modified nucleotide
caggttcagatacttcaatcactgctg

SEQ ID NO: 1338 - RNA, 27 nt, synthetic construct
  source 1..27: mol_type = other RNA
  modified_base 1: mod_base = OTHER; note = 2'-O-methyl modified nucleotide
  modified_base 2: mod_base = OTHER; note = 2'-O-methyl modified nucleotide
  modified_base 3: mod_base = OTHER; note = 2'-O-methyl modified nucleotide
  modified_base 4: mod_base = OTHER; note = 2'-O-methyl modified nucleotide
  modified_base 11: mod_base = OTHER; note = 2'-O-methyl modified nucleotide
  modified_base 13: mod_base = OTHER; note = 2'-O-methyl modified nucleotide
  modified_base 23: mod_base = OTHER; note = 2'-O-methyl modified nucleotide
  modified_base 25: mod_base = OTHER; note = 2'-O-methyl modified nucleotide
  modified_base 26: mod_base = OTHER; note = 2'-O-methyl modified nucleotide
  modified_base 27: mod_base = OTHER; note = 2'-O-methyl modified nucleotide
gcaggtacagatacttcaatcactgct

SEQ ID NO: 1339 - RNA, 27 nt, synthetic construct
  source 1..27: mol_type = other RNA
  modified_base 1: mod_base = OTHER; note = 2'-O-methyl modified nucleotide
  modified_base 2: mod_base = OTHER; note = 2'-O-methyl modified nucleotide
  modified_base 3: mod_base = OTHER; note = 2'-O-methyl modified nucleotide
  modified_base 4: mod_base = OTHER; note = 2'-O-methyl modified nucleotide
  modified_base 11: mod_base = OTHER; note = 2'-O-methyl modified nucleotide
  modified_base 13: mod_base = OTHER; note = 2'-O-methyl modified nucleotide
  modified_base 23: mod_base = OTHER; note = 2'-O-methyl modified nucleotide
  modified_base 25: mod_base = OTHER; note = 2'-O-methyl modified nucleotide
  modified_base 26: mod_base = OTHER; note = 2'-O-methyl modified nucleotide
  modified_base 27: mod_base = OTHER; note = 2'-O-methyl modified nucleotide
ggcagttacagatacttcaatcactgc

SEQ ID NO: 1340 - RNA, 27 nt, synthetic construct
  source 1..27: mol_type = other RNA
  modified_base 1: mod_base = OTHER; note = 2'-O-methyl modified nucleotide
  modified_base 2: mod_base = OTHER; note = 2'-O-methyl modified nucleotide
  modified_base 3: mod_base = OTHER; note = 2'-O-methyl modified nucleotide
  modified_base 4: mod_base = OTHER; note = 2'-O-methyl modified nucleotide
  modified_base 11: mod_base = OTHER; note = 2'-O-methyl modified nucleotide
  modified_base 13: mod_base = OTHER; note = 2'-O-methyl modified nucleotide
  modified_base 23: mod_base = OTHER; note = 2'-O-methyl modified nucleotide
  modified_base 25: mod_base = OTHER; note = 2'-O-methyl modified nucleotide
  modified_base 26: mod_base = OTHER; note = 2'-O-methyl modified nucleotide
  modified_base 27: mod_base = OTHER; note = 2'-O-methyl modified nucleotide
tggggtcaggtacagatacttcaatca

SEQ ID NO: 1341 - RNA, 27 nt, synthetic construct
  source 1..27: mol_type = other RNA
  modified_base 1: mod_base = OTHER; note = 2'-O-methyl modified nucleotide
  modified_base 2: mod_base = OTHER; note = 2'-O-methyl modified nucleotide
  modified_base 3: mod_base = OTHER; note = 2'-O-methyl modified nucleotide
  modified_base 4: mod_base = OTHER; note = 2'-O-methyl modified nucleotide
  modified_base 11: mod_base = OTHER; note = 2'-O-methyl modified nucleotide
  modified_base 13: mod_base = OTHER; note = 2'-O-methyl modified nucleotide
  modified_base 23: mod_base = OTHER; note = 2'-O-methyl modified nucleotide
  modified_base 25: mod_base = OTHER; note = 2'-O-methyl modified nucleotide
  modified_base 26: mod_base = OTHER; note = 2'-O-methyl modified nucleotide
  modified_base 27: mod_base = OTHER; note = 2'-O-methyl modified nucleotide
tcagttaaagggaagcaccgaaatgct

SEQ ID NO: 1342 - RNA, 27 nt, synthetic construct
  source 1..27: mol_type = other RNA
  modified_base 1: mod_base = OTHER; note = 2'-O-methyl modified nucleotide
  modified_base 2: mod_base = OTHER; note = 2'-O-methyl modified nucleotide
  modified_base 3: mod_base = OTHER; note = 2'-O-methyl modified nucleotide
  modified_base 4: mod_base = OTHER; note = 2'-O-methyl modified nucleotide
  modified_base 11: mod_base = OTHER; note = 2'-O-methyl modified nucleotide
  modified_base 13: mod_base = OTHER; note = 2'-O-methyl modified nucleotide
  modified_base 23: mod_base = OTHER; note = 2'-O-methyl modified nucleotide
  modified_base 25: mod_base = OTHER; note = 2'-O-methyl modified nucleotide
  modified_base 26: mod_base = OTHER; note = 2'-O-methyl modified nucleotide
  modified_base 27: mod_base = OTHER; note = 2'-O-methyl modified nucleotide
tcacttcagtgaaagggaagcaccgaa

SEQ ID NO: 1343 - RNA, 27 nt, synthetic construct
  source 1..27: mol_type = other RNA
  modified_base 1: mod_base = OTHER; note = 2'-O-methyl modified nucleotide
  modified_base 2: mod_base = OTHER; note = 2'-O-methyl modified nucleotide
  modified_base 3: mod_base = OTHER; note = 2'-O-methyl modified nucleotide
  modified_base 4: mod_base = OTHER; note = 2'-O-methyl modified nucleotide
  modified_base 11: mod_base = OTHER; note = 2'-O-methyl modified nucleotide
  modified_base 13: mod_base = OTHER; note = 2'-O-methyl modified nucleotide
  modified_base 23: mod_base = OTHER; note = 2'-O-methyl modified nucleotide
  modified_base 25: mod_base = OTHER; note = 2'-O-methyl modified nucleotide
  modified_base 26: mod_base = OTHER; note = 2'-O-methyl modified nucleotide
  modified_base 27: mod_base = OTHER; note = 2'-O-methyl modified nucleotide
ttcacttcagtgaaagggaagcaccga

SEQ ID NO: 1344 - RNA, 27 nt, synthetic construct
  source 1..27: mol_type = other RNA
  modified_base 1: mod_base = OTHER; note = 2'-O-methyl modified nucleotide
  modified_base 2: mod_base = OTHER; note = 2'-O-methyl modified nucleotide
  modified_base 3: mod_base = OTHER; note = 2'-O-methyl modified nucleotide
  modified_base 4: mod_base = OTHER; note = 2'-O-methyl modified nucleotide
  modified_base 11: mod_base = OTHER; note = 2'-O-methyl modified nucleotide
  modified_base 13: mod_base = OTHER; note = 2'-O-methyl modified nucleotide
  modified_base 23: mod_base = OTHER; note = 2'-O-methyl modified nucleotide
  modified_base 25: mod_base = OTHER; note = 2'-O-methyl modified nucleotide
  modified_base 26: mod_base = OTHER; note = 2'-O-methyl modified nucleotide
  modified_base 27: mod_base = OTHER; note = 2'-O-methyl modified nucleotide
attcatttcagtgaaagggaagcaccg

SEQ ID NO: 1345 - RNA, 27 nt, synthetic construct
  source 1..27: mol_type = other RNA
  modified_base 1: mod_base = OTHER; note = 2'-O-methyl modified nucleotide
  modified_base 2: mod_base = OTHER; note = 2'-O-methyl modified nucleotide
  modified_base 3: mod_base = OTHER; note = 2'-O-methyl modified nucleotide
  modified_base 4: mod_base = OTHER; note = 2'-O-methyl modified nucleotide
  modified_base 11: mod_base = OTHER; note = 2'-O-methyl modified nucleotide
  modified_base 13: mod_base = OTHER; note = 2'-O-methyl modified nucleotide
  modified_base 23: mod_base = OTHER; note = 2'-O-methyl modified nucleotide
  modified_base 25: mod_base = OTHER; note = 2'-O-methyl modified nucleotide
  modified_base 26: mod_base = OTHER; note = 2'-O-methyl modified nucleotide
  modified_base 27: mod_base = OTHER; note = 2'-O-methyl modified nucleotide
tattctcttcagtgaaagggaagcacc

SEQ ID NO: 1346 - RNA, 27 nt, synthetic construct
  source 1..27: mol_type = other RNA
  modified_base 1: mod_base = OTHER; note = 2'-O-methyl modified nucleotide
  modified_base 2: mod_base = OTHER; note = 2'-O-methyl modified nucleotide
  modified_base 3: mod_base = OTHER; note = 2'-O-methyl modified nucleotide
  modified_base 4: mod_base = OTHER; note = 2'-O-methyl modified nucleotide
  modified_base 11: mod_base = OTHER; note = 2'-O-methyl modified nucleotide
  modified_base 13: mod_base = OTHER; note = 2'-O-methyl modified nucleotide
  modified_base 23: mod_base = OTHER; note = 2'-O-methyl modified nucleotide
  modified_base 25: mod_base = OTHER; note = 2'-O-methyl modified nucleotide
  modified_base 26: mod_base = OTHER; note = 2'-O-methyl modified nucleotide
  modified_base 27: mod_base = OTHER; note = 2'-O-methyl modified nucleotide
gtatttacttcagtgaaagggaagcac

SEQ ID NO: 1347 - RNA, 27 nt, synthetic construct
  source 1..27: mol_type = other RNA
  modified_base 1: mod_base = OTHER; note = 2'-O-methyl modified nucleotide
  modified_base 2: mod_base = OTHER; note = 2'-O-methyl modified nucleotide
  modified_base 3: mod_base = OTHER; note = 2'-O-methyl modified nucleotide
  modified_base 4: mod_base = OTHER; note = 2'-O-methyl modified nucleotide
  modified_base 11: mod_base = OTHER; note = 2'-O-methyl modified nucleotide
  modified_base 13: mod_base = OTHER; note = 2'-O-methyl modified nucleotide
  modified_base 23: mod_base = OTHER; note = 2'-O-methyl modified nucleotide
  modified_base 25: mod_base = OTHER; note = 2'-O-methyl modified nucleotide
  modified_base 26: mod_base = OTHER; note = 2'-O-methyl modified nucleotide
  modified_base 27: mod_base = OTHER; note = 2'-O-methyl modified nucleotide
tgtattcacttcagtgaaagggaagca

SEQ ID NO: 1348 - RNA, 27 nt, synthetic construct
  source 1..27: mol_type = other RNA
  modified_base 1: mod_base = OTHER; note = 2'-O-methyl modified nucleotide
  modified_base 2: mod_base = OTHER; note = 2'-O-methyl modified nucleotide
  modified_base 3: mod_base = OTHER; note = 2'-O-methyl modified nucleotide
  modified_base 4: mod_base = OTHER; note = 2'-O-methyl modified nucleotide
  modified_base 11: mod_base = OTHER; note = 2'-O-methyl modified nucleotide
  modified_base 13: mod_base = OTHER; note = 2'-O-methyl modified nucleotide
  modified_base 23: mod_base = OTHER; note = 2'-O-methyl modified nucleotide
  modified_base 25: mod_base = OTHER; note = 2'-O-methyl modified nucleotide
  modified_base 26: mod_base = OTHER; note = 2'-O-methyl modified nucleotide
  modified_base 27: mod_base = OTHER; note = 2'-O-methyl modified nucleotide
atgtattcacttcagtgaaagggaagc

SEQ ID NO: 1349 - RNA, 27 nt, synthetic construct
  source 1..27: mol_type = other RNA
  modified_base 1: mod_base = OTHER; note = 2'-O-methyl modified nucleotide
  modified_base 2: mod_base = OTHER; note = 2'-O-methyl modified nucleotide
  modified_base 3: mod_base = OTHER; note = 2'-O-methyl modified nucleotide
  modified_base 4: mod_base = OTHER; note = 2'-O-methyl modified nucleotide
  modified_base 11: mod_base = OTHER; note = 2'-O-methyl modified nucleotide
  modified_base 13: mod_base = OTHER; note = 2'-O-methyl modified nucleotide
  modified_base 23: mod_base = OTHER; note = 2'-O-methyl modified nucleotide
  modified_base 25: mod_base = OTHER; note = 2'-O-methyl modified nucleotide
  modified_base 26: mod_base = OTHER; note = 2'-O-methyl modified nucleotide
  modified_base 27: mod_base = OTHER; note = 2'-O-methyl modified nucleotide
catgttttcacttcagtgaaagggaag

SEQ ID NO: 1350 - RNA, 27 nt, synthetic construct
  source 1..27: mol_type = other RNA
  modified_base 1: mod_base = OTHER; note = 2'-O-methyl modified nucleotide
  modified_base 2: mod_base = OTHER; note = 2'-O-methyl modified nucleotide
  modified_base 3: mod_base = OTHER; note = 2'-O-methyl modified nucleotide
  modified_base 4: mod_base = OTHER; note = 2'-O-methyl modified nucleotide
  modified_base 11: mod_base = OTHER; note = 2'-O-methyl modified nucleotide
  modified_base 13: mod_base = OTHER; note = 2'-O-methyl modified nucleotide
  modified_base 23: mod_base = OTHER; note = 2'-O-methyl modified nucleotide
  modified_base 25: mod_base = OTHER; note = 2'-O-methyl modified nucleotide
  modified_base 26: mod_base = OTHER; note = 2'-O-methyl modified nucleotide
  modified_base 27: mod_base = OTHER; note = 2'-O-methyl modified nucleotide
ccatgtattcacttcagtgaaagggaa

SEQ ID NO: 1351 - RNA, 27 nt, synthetic construct
  source 1..27: mol_type = other RNA
  modified_base 1: mod_base = OTHER; note = 2'-O-methyl modified nucleotide
  modified_base 2: mod_base = OTHER; note = 2'-O-methyl modified nucleotide
  modified_base 3: mod_base = OTHER; note = 2'-O-methyl modified nucleotide
  modified_base 4: mod_base = OTHER; note = 2'-O-methyl modified nucleotide
  modified_base 11: mod_base = OTHER; note = 2'-O-methyl modified nucleotide
  modified_base 13: mod_base = OTHER; note = 2'-O-methyl modified nucleotide
  modified_base 23: mod_base = OTHER; note = 2'-O-methyl modified nucleotide
  modified_base 25: mod_base = OTHER; note = 2'-O-methyl modified nucleotide
  modified_base 26: mod_base = OTHER; note = 2'-O-methyl modified nucleotide
  modified_base 27: mod_base = OTHER; note = 2'-O-methyl modified nucleotide
accatttattcacttcagtgaaaggga

SEQ ID NO: 1352 - RNA, 27 nt, synthetic construct
  source 1..27: mol_type = other RNA
  modified_base 1: mod_base = OTHER; note = 2'-O-methyl modified nucleotide
  modified_base 2: mod_base = OTHER; note = 2'-O-methyl modified nucleotide
  modified_base 3: mod_base = OTHER; note = 2'-O-methyl modified nucleotide
  modified_base 4: mod_base = OTHER; note = 2'-O-methyl modified nucleotide
  modified_base 11: mod_base = OTHER; note = 2'-O-methyl modified nucleotide
  modified_base 13: mod_base = OTHER; note = 2'-O-methyl modified nucleotide
  modified_base 23: mod_base = OTHER; note = 2'-O-methyl modified nucleotide
  modified_base 25: mod_base = OTHER; note = 2'-O-methyl modified nucleotide
  modified_base 26: mod_base = OTHER; note = 2'-O-methyl modified nucleotide
  modified_base 27: mod_base = OTHER; note = 2'-O-methyl modified nucleotide
taccatgtattcacttcagtgaaaggg

SEQ ID NO: 1353 - RNA, 27 nt, synthetic construct
  source 1..27: mol_type = other RNA
  modified_base 1: mod_base = OTHER; note = 2'-O-methyl modified nucleotide
  modified_base 2: mod_base = OTHER; note = 2'-O-methyl modified nucleotide
  modified_base 3: mod_base = OTHER; note = 2'-O-methyl modified nucleotide
  modified_base 4: mod_base = OTHER; note = 2'-O-methyl modified nucleotide
  modified_base 11: mod_base = OTHER; note = 2'-O-methyl modified nucleotide
  modified_base 13: mod_base = OTHER; note = 2'-O-methyl modified nucleotide
  modified_base 23: mod_base = OTHER; note = 2'-O-methyl modified nucleotide
  modified_base 25: mod_base = OTHER; note = 2'-O-methyl modified nucleotide
  modified_base 26: mod_base = OTHER; note = 2'-O-methyl modified nucleotide
  modified_base 27: mod_base = OTHER; note = 2'-O-methyl modified nucleotide
ctaccttgtattcacttcagtgaaagg

SEQ ID NO: 1354 - RNA, 27 nt, synthetic construct
  source 1..27: mol_type = other RNA
  modified_base 1: mod_base = OTHER; note = 2'-O-methyl modified nucleotide
  modified_base 2: mod_base = OTHER; note = 2'-O-methyl modified nucleotide
  modified_base 3: mod_base = OTHER; note = 2'-O-methyl modified nucleotide
  modified_base 4: mod_base = OTHER; note = 2'-O-methyl modified nucleotide
  modified_base 11: mod_base = OTHER; note = 2'-O-methyl modified nucleotide
  modified_base 13: mod_base = OTHER; note = 2'-O-methyl modified nucleotide
  modified_base 23: mod_base = OTHER; note = 2'-O-methyl modified nucleotide
  modified_base 25: mod_base = OTHER; note = 2'-O-methyl modified nucleotide
  modified_base 26: mod_base = OTHER; note = 2'-O-methyl modified nucleotide
  modified_base 27: mod_base = OTHER; note = 2'-O-methyl modified nucleotide
gctactatgtattcacttcagtgaaag

SEQ ID NO: 1355 - RNA, 27 nt, synthetic construct
  source 1..27: mol_type = other RNA
  modified_base 1: mod_base = OTHER; note = 2'-O-methyl modified nucleotide
  modified_base 2: mod_base = OTHER; note = 2'-O-methyl modified nucleotide
  modified_base 3: mod_base = OTHER; note = 2'-O-methyl modified nucleotide
  modified_base 4: mod_base = OTHER; note = 2'-O-methyl modified nucleotide
  modified_base 11: mod_base = OTHER; note = 2'-O-methyl modified nucleotide
  modified_base 13: mod_base = OTHER; note = 2'-O-methyl modified nucleotide
  modified_base 23: mod_base = OTHER; note = 2'-O-methyl modified nucleotide
  modified_base 25: mod_base = OTHER; note = 2'-O-methyl modified nucleotide
  modified_base 26: mod_base = OTHER; note = 2'-O-methyl modified nucleotide
  modified_base 27: mod_base = OTHER; note = 2'-O-methyl modified nucleotide
tgctatcatgtattcacttcagtgaaa

SEQ ID NO: 1356 - RNA, 27 nt, synthetic construct
  source 1..27: mol_type = other RNA
  modified_base 1: mod_base = OTHER; note = 2'-O-methyl modified nucleotide
  modified_base 2: mod_base = OTHER; note = 2'-O-methyl modified nucleotide
  modified_base 3: mod_base = OTHER; note = 2'-O-methyl modified nucleotide
  modified_base 4: mod_base = OTHER; note = 2'-O-methyl modified nucleotide
  modified_base 11: mod_base = OTHER; note = 2'-O-methyl modified nucleotide
  modified_base 13: mod_base = OTHER; note = 2'-O-methyl modified nucleotide
  modified_base 23: mod_base = OTHER; note = 2'-O-methyl modified nucleotide
  modified_base 25: mod_base = OTHER; note = 2'-O-methyl modified nucleotide
  modified_base 26: mod_base = OTHER; note = 2'-O-methyl modified nucleotide
  modified_base 27: mod_base = OTHER; note = 2'-O-methyl modified nucleotide
ctgcttccatgtattcacttcagtgaa

SEQ ID NO: 1357 - RNA, 27 nt, synthetic construct
  source 1..27: mol_type = other RNA
  modified_base 1: mod_base = OTHER; note = 2'-O-methyl modified nucleotide
  modified_base 2: mod_base = OTHER; note = 2'-O-methyl modified nucleotide
  modified_base 3: mod_base = OTHER; note = 2'-O-methyl modified nucleotide
  modified_base 4: mod_base = OTHER; note = 2'-O-methyl modified nucleotide
  modified_base 11: mod_base = OTHER; note = 2'-O-methyl modified nucleotide
  modified_base 13: mod_base = OTHER; note = 2'-O-methyl modified nucleotide
  modified_base 23: mod_base = OTHER; note = 2'-O-methyl modified nucleotide
  modified_base 25: mod_base = OTHER; note = 2'-O-methyl modified nucleotide
  modified_base 26: mod_base = OTHER; note = 2'-O-methyl modified nucleotide
  modified_base 27: mod_base = OTHER; note = 2'-O-methyl modified nucleotide
cctgctaccatgtattcacttcagtga

SEQ ID NO: 1358 - RNA, 27 nt, synthetic construct
  source 1..27: mol_type = other RNA
  modified_base 1: mod_base = OTHER; note = 2'-O-methyl modified nucleotide
  modified_base 2: mod_base = OTHER; note = 2'-O-methyl modified nucleotide
  modified_base 3: mod_base = OTHER; note = 2'-O-methyl modified nucleotide
  modified_base 4: mod_base = OTHER; note = 2'-O-methyl modified nucleotide
  modified_base 11: mod_base = OTHER; note = 2'-O-methyl modified nucleotide
  modified_base 13: mod_base = OTHER; note = 2'-O-methyl modified nucleotide
  modified_base 23: mod_base = OTHER; note = 2'-O-methyl modified nucleotide
  modified_base 25: mod_base = OTHER; note = 2'-O-methyl modified nucleotide
  modified_base 26: mod_base = OTHER; note = 2'-O-methyl modified nucleotide
  modified_base 27: mod_base = OTHER; note = 2'-O-methyl modified nucleotide
ccctgttaccatgtattcacttcagtg

SEQ ID NO: 1359 - RNA, 27 nt, synthetic construct
  source 1..27: mol_type = other RNA
  modified_base 1: mod_base = OTHER; note = 2'-O-methyl modified nucleotide
  modified_base 2: mod_base = OTHER; note = 2'-O-methyl modified nucleotide
  modified_base 3: mod_base = OTHER; note = 2'-O-methyl modified nucleotide
  modified_base 4: mod_base = OTHER; note = 2'-O-methyl modified nucleotide
  modified_base 11: mod_base = OTHER; note = 2'-O-methyl modified nucleotide
  modified_base 13: mod_base = OTHER; note = 2'-O-methyl modified nucleotide
  modified_base 23: mod_base = OTHER; note = 2'-O-methyl modified nucleotide
  modified_base 25: mod_base = OTHER; note = 2'-O-methyl modified nucleotide
  modified_base 26: mod_base = OTHER; note = 2'-O-methyl modified nucleotide
  modified_base 27: mod_base = OTHER; note = 2'-O-methyl modified nucleotide
acccttctaccatgtattcacttcagt

SEQ ID NO: 1360 - RNA, 27 nt, synthetic construct
  source 1..27: mol_type = other RNA
  modified_base 1: mod_base = OTHER; note = 2'-O-methyl modified nucleotide
  modified_base 2: mod_base = OTHER; note = 2'-O-methyl modified nucleotide
  modified_base 3: mod_base = OTHER; note = 2'-O-methyl modified nucleotide
  modified_base 4: mod_base = OTHER; note = 2'-O-methyl modified nucleotide
  modified_base 11: mod_base = OTHER; note = 2'-O-methyl modified nucleotide
  modified_base 13: mod_base = OTHER; note = 2'-O-methyl modified nucleotide
  modified_base 23: mod_base = OTHER; note = 2'-O-methyl modified nucleotide
  modified_base 25: mod_base = OTHER; note = 2'-O-methyl modified nucleotide
  modified_base 26: mod_base = OTHER; note = 2'-O-methyl modified nucleotide
  modified_base 27: mod_base = OTHER; note = 2'-O-methyl modified nucleotide
agaccttgctaccatgtattcacttca

SEQ ID NO: 1361 - RNA, 27 nt, synthetic construct
  source 1..27: mol_type = other RNA
  modified_base 1: mod_base = OTHER; note = 2'-O-methyl modified nucleotide
  modified_base 2: mod_base = OTHER; note = 2'-O-methyl modified nucleotide
  modified_base 3: mod_base = OTHER; note = 2'-O-methyl modified nucleotide
  modified_base 4: mod_base = OTHER; note = 2'-O-methyl modified nucleotide
  modified_base 11: mod_base = OTHER; note = 2'-O-methyl modified nucleotide
  modified_base 13: mod_base = OTHER; note = 2'-O-methyl modified nucleotide
  modified_base 23: mod_base = OTHER; note = 2'-O-methyl modified nucleotide
  modified_base 25: mod_base = OTHER; note = 2'-O-methyl modified nucleotide
  modified_base 26: mod_base = OTHER; note = 2'-O-methyl modified nucleotide
  modified_base 27: mod_base = OTHER; note = 2'-O-methyl modified nucleotide
aagactctgctaccatgtattcacttc

SEQ ID NO: 1362 - RNA, 27 nt, synthetic construct
  source 1..27: mol_type = other RNA
  modified_base 1: mod_base = OTHER; note = 2'-O-methyl modified nucleotide
  modified_base 2: mod_base = OTHER; note = 2'-O-methyl modified nucleotide
  modified_base 3: mod_base = OTHER; note = 2'-O-methyl modified nucleotide
  modified_base 4: mod_base = OTHER; note = 2'-O-methyl modified nucleotide
  modified_base 11: mod_base = OTHER; note = 2'-O-methyl modified nucleotide
  modified_base 13: mod_base = OTHER; note = 2'-O-methyl modified nucleotide
  modified_base 23: mod_base = OTHER; note = 2'-O-methyl modified nucleotide
  modified_base 25: mod_base = OTHER; note = 2'-O-methyl modified nucleotide
  modified_base 26: mod_base = OTHER; note = 2'-O-methyl modified nucleotide
  modified_base 27: mod_base = OTHER; note = 2'-O-methyl modified nucleotide
aaagatcctgctaccatgtattcactt

SEQ ID NO: 1363 - RNA, 27 nt, synthetic construct
  source 1..27: mol_type = other RNA
  modified_base 1: mod_base = OTHER; note = 2'-O-methyl modified nucleotide
  modified_base 2: mod_base = OTHER; note = 2'-O-methyl modified nucleotide
  modified_base 3: mod_base = OTHER; note = 2'-O-methyl modified nucleotide
  modified_base 4: mod_base = OTHER; note = 2'-O-methyl modified nucleotide
  modified_base 11: mod_base = OTHER; note = 2'-O-methyl modified nucleotide
  modified_base 13: mod_base = OTHER; note = 2'-O-methyl modified nucleotide
  modified_base 23: mod_base = OTHER; note = 2'-O-methyl modified nucleotide
  modified_base 25: mod_base = OTHER; note = 2'-O-methyl modified nucleotide
  modified_base 26: mod_base = OTHER; note = 2'-O-methyl modified nucleotide
  modified_base 27: mod_base = OTHER; note = 2'-O-methyl modified nucleotide
acaaataccctgctaccatgtattcac

SEQ ID NO: 1364 - RNA, 27 nt, synthetic construct
  source 1..27: mol_type = other RNA
  modified_base 1: mod_base = OTHER; note = 2'-O-methyl modified nucleotide
  modified_base 2: mod_base = OTHER; note = 2'-O-methyl modified nucleotide
  modified_base 3: mod_base = OTHER; note = 2'-O-methyl modified nucleotide
  modified_base 4: mod_base = OTHER; note = 2'-O-methyl modified nucleotide
  modified_base 11: mod_base = OTHER; note = 2'-O-methyl modified nucleotide
  modified_base 13: mod_base = OTHER; note = 2'-O-methyl modified nucleotide
  modified_base 23: mod_base = OTHER; note = 2'-O-methyl modified nucleotide
  modified_base 25: mod_base = OTHER; note = 2'-O-methyl modified nucleotide
  modified_base 26: mod_base = OTHER; note = 2'-O-methyl modified nucleotide
  modified_base 27: mod_base = OTHER; note = 2'-O-methyl modified nucleotide
cacaatgaccctgctaccatgtattca

SEQ ID NO: 1365 - RNA, 27 nt, synthetic construct
  source 1..27: mol_type = other RNA
  modified_base 1: mod_base = OTHER; note = 2'-O-methyl modified nucleotide
  modified_base 2: mod_base = OTHER; note = 2'-O-methyl modified nucleotide
  modified_base 3: mod_base = OTHER; note = 2'-O-methyl modified nucleotide
  modified_base 4: mod_base = OTHER; note = 2'-O-methyl modified nucleotide
  modified_base 11: mod_base = OTHER; note = 2'-O-methyl modified nucleotide
  modified_base 13: mod_base = OTHER; note = 2'-O-methyl modified nucleotide
  modified_base 23: mod_base = OTHER; note = 2'-O-methyl modified nucleotide
  modified_base 25: mod_base = OTHER; note = 2'-O-methyl modified nucleotide
  modified_base 26: mod_base = OTHER; note = 2'-O-methyl modified nucleotide
  modified_base 27: mod_base = OTHER; note = 2'-O-methyl modified nucleotide
cacagtacacaaagaccctgctaccat

SEQ ID NO: 1366 - RNA, 27 nt, synthetic construct
  source 1..27: mol_type = other RNA
  modified_base 1: mod_base = OTHER; note = 2'-O-methyl modified nucleotide
  modified_base 2: mod_base = OTHER; note = 2'-O-methyl modified nucleotide
  modified_base 3: mod_base = OTHER; note = 2'-O-methyl modified nucleotide
  modified_base 4: mod_base = OTHER; note = 2'-O-methyl modified nucleotide
  modified_base 11: mod_base = OTHER; note = 2'-O-methyl modified nucleotide
  modified_base 13: mod_base = OTHER; note = 2'-O-methyl modified nucleotide
  modified_base 23: mod_base = OTHER; note = 2'-O-methyl modified nucleotide
  modified_base 25: mod_base = OTHER; note = 2'-O-methyl modified nucleotide
  modified_base 26: mod_base = OTHER; note = 2'-O-methyl modified nucleotide
  modified_base 27: mod_base = OTHER; note = 2'-O-methyl modified nucleotide
aaaattcacagcacacaaagaccctgc

SEQ ID NO: 1367 - RNA, 27 nt, synthetic construct
  source 1..27: mol_type = other RNA
  modified_base 1: mod_base = OTHER; note = 2'-O-methyl modified nucleotide
  modified_base 2: mod_base = OTHER; note = 2'-O-methyl modified nucleotide
  modified_base 3: mod_base = OTHER; note = 2'-O-methyl modified nucleotide
  modified_base 4: mod_base = OTHER; note = 2'-O-methyl modified nucleotide
  modified_base 11: mod_base = OTHER; note = 2'-O-methyl modified nucleotide
  modified_base 13: mod_base = OTHER; note = 2'-O-methyl modified nucleotide
  modified_base 23: mod_base = OTHER; note = 2'-O-methyl modified nucleotide
  modified_base 25: mod_base = OTHER; note = 2'-O-methyl modified nucleotide
  modified_base 26: mod_base = OTHER; note = 2'-O-methyl modified nucleotide
  modified_base 27: mod_base = OTHER; note = 2'-O-methyl modified nucleotide
acaaattccacagcacacaaagaccct

SEQ ID NO: 1368 - RNA, 27 nt, synthetic construct
  source 1..27: mol_type = other RNA
  modified_base 1: mod_base = OTHER; note = 2'-O-methyl modified nucleotide
  modified_base 2: mod_base = OTHER; note = 2'-O-methyl modified nucleotide
  modified_base 3: mod_base = OTHER; note = 2'-O-methyl modified nucleotide
  modified_base 4: mod_base = OTHER; note = 2'-O-methyl modified nucleotide
  modified_base 11: mod_base = OTHER; note = 2'-O-methyl modified nucleotide
  modified_base 13: mod_base = OTHER; note = 2'-O-methyl modified nucleotide
  modified_base 23: mod_base = OTHER; note = 2'-O-methyl modified nucleotide
  modified_base 25: mod_base = OTHER; note = 2'-O-methyl modified nucleotide
  modified_base 26: mod_base = OTHER; note = 2'-O-methyl modified nucleotide
  modified_base 27: mod_base = OTHER; note = 2'-O-methyl modified nucleotide
gaagctacaaaatccacagcacacaaa

SEQ ID NO: 1369 - RNA, 27 nt, synthetic construct
  source 1..27: mol_type = other RNA
  modified_base 1: mod_base = OTHER; note = 2'-O-methyl modified nucleotide
  modified_base 2: mod_base = OTHER; note = 2'-O-methyl modified nucleotide
  modified_base 3: mod_base = OTHER; note = 2'-O-methyl modified nucleotide
  modified_base 4: mod_base = OTHER; note = 2'-O-methyl modified nucleotide
  modified_base 11: mod_base = OTHER; note = 2'-O-methyl modified nucleotide
  modified_base 13: mod_base = OTHER; note = 2'-O-methyl modified nucleotide
  modified_base 23: mod_base = OTHER; note = 2'-O-methyl modified nucleotide
  modified_base 25: mod_base = OTHER; note = 2'-O-methyl modified nucleotide
  modified_base 26: mod_base = OTHER; note = 2'-O-methyl modified nucleotide
  modified_base 27: mod_base = OTHER; note = 2'-O-methyl modified nucleotide
tgaagtcacaaaatccacagcacacaa

SEQ ID NO: 1370 - RNA, 27 nt, synthetic construct
  source 1..27: mol_type = other RNA
  modified_base 1: mod_base = OTHER; note = 2'-O-methyl modified nucleotide
  modified_base 2: mod_base = OTHER; note = 2'-O-methyl modified nucleotide
  modified_base 3: mod_base = OTHER; note = 2'-O-methyl modified nucleotide
  modified_base 4: mod_base = OTHER; note = 2'-O-methyl modified nucleotide
  modified_base 11: mod_base = OTHER; note = 2'-O-methyl modified nucleotide
  modified_base 13: mod_base = OTHER; note = 2'-O-methyl modified nucleotide
  modified_base 23: mod_base = OTHER; note = 2'-O-methyl modified nucleotide
  modified_base 25: mod_base = OTHER; note = 2'-O-methyl modified nucleotide
  modified_base 26: mod_base = OTHER; note = 2'-O-methyl modified nucleotide
  modified_base 27: mod_base = OTHER; note = 2'-O-methyl modified nucleotide
ttgaatccacaaaatccacagcacaca

SEQ ID NO: 1371 - RNA, 27 nt, synthetic construct
  source 1..27: mol_type = other RNA
  modified_base 1: mod_base = OTHER; note = 2'-O-methyl modified nucleotide
  modified_base 2: mod_base = OTHER; note = 2'-O-methyl modified nucleotide
  modified_base 3: mod_base = OTHER; note = 2'-O-methyl modified nucleotide
  modified_base 4: mod_base = OTHER; note = 2'-O-methyl modified nucleotide
  modified_base 11: mod_base = OTHER; note = 2'-O-methyl modified nucleotide
  modified_base 13: mod_base = OTHER; note = 2'-O-methyl modified nucleotide
  modified_base 23: mod_base = OTHER; note = 2'-O-methyl modified nucleotide
  modified_base 25: mod_base = OTHER; note = 2'-O-methyl modified nucleotide
  modified_base 26: mod_base = OTHER; note = 2'-O-methyl modified nucleotide
  modified_base 27: mod_base = OTHER; note = 2'-O-methyl modified nucleotide
attgatgccacaaaatccacagcacac

SEQ ID NO: 1372 - RNA, 27 nt, synthetic construct
  source 1..27: mol_type = other RNA
  modified_base 1: mod_base = OTHER; note = 2'-O-methyl modified nucleotide
  modified_base 2: mod_base = OTHER; note = 2'-O-methyl modified nucleotide
  modified_base 3: mod_base = OTHER; note = 2'-O-methyl modified nucleotide
  modified_base 4: mod_base = OTHER; note = 2'-O-methyl modified nucleotide
  modified_base 11: mod_base = OTHER; note = 2'-O-methyl modified nucleotide
  modified_base 13: mod_base = OTHER; note = 2'-O-methyl modified nucleotide
  modified_base 23: mod_base = OTHER; note = 2'-O-methyl modified nucleotide
  modified_base 25: mod_base = OTHER; note = 2'-O-methyl modified nucleotide
  modified_base 26: mod_base = OTHER; note = 2'-O-methyl modified nucleotide
  modified_base 27: mod_base = OTHER; note = 2'-O-methyl modified nucleotide
gattgtagccacaaaatccacagcaca

SEQ ID NO: 1373 - RNA, 27 nt, synthetic construct
  source 1..27: mol_type = other RNA
  modified_base 1: mod_base = OTHER; note = 2'-O-methyl modified nucleotide
  modified_base 2: mod_base = OTHER; note = 2'-O-methyl modified nucleotide
  modified_base 3: mod_base = OTHER; note = 2'-O-methyl modified nucleotide
  modified_base 4: mod_base = OTHER; note = 2'-O-methyl modified nucleotide
  modified_base 11: mod_base = OTHER; note = 2'-O-methyl modified nucleotide
  modified_base 13: mod_base = OTHER; note = 2'-O-methyl modified nucleotide
  modified_base 23: mod_base = OTHER; note = 2'-O-methyl modified nucleotide
  modified_base 25: mod_base = OTHER; note = 2'-O-methyl modified nucleotide
  modified_base 26: mod_base = OTHER; note = 2'-O-methyl modified nucleotide
  modified_base 27: mod_base = OTHER; note = 2'-O-methyl modified nucleotide
agatttaagccacaaaatccacagcac

SEQ ID NO: 1374 - RNA, 27 nt, synthetic construct
  source 1..27: mol_type = other RNA
  modified_base 1: mod_base = OTHER; note = 2'-O-methyl modified nucleotide
  modified_base 2: mod_base = OTHER; note = 2'-O-methyl modified nucleotide
  modified_base 3: mod_base = OTHER; note = 2'-O-methyl modified nucleotide
  modified_base 4: mod_base = OTHER; note = 2'-O-methyl modified nucleotide
  modified_base 11: mod_base = OTHER; note = 2'-O-methyl modified nucleotide
  modified_base 13: mod_base = OTHER; note = 2'-O-methyl modified nucleotide
  modified_base 23: mod_base = OTHER; note = 2'-O-methyl modified nucleotide
  modified_base 25: mod_base = OTHER; note = 2'-O-methyl modified nucleotide
  modified_base 26: mod_base = OTHER; note = 2'-O-methyl modified nucleotide
  modified_base 27: mod_base = OTHER; note = 2'-O-methyl modified nucleotide
tagattgaagccacaaaatccacagca

SEQ ID NO: 1375 - RNA, 27 nt, synthetic construct
  source 1..27: mol_type = other RNA
  modified_base 1: mod_base = OTHER; note = 2'-O-methyl modified nucleotide
  modified_base 2: mod_base = OTHER; note = 2'-O-methyl modified nucleotide
  modified_base 3: mod_base = OTHER; note = 2'-O-methyl modified nucleotide
  modified_base 4: mod_base = OTHER; note = 2'-O-methyl modified nucleotide
  modified_base 11: mod_base = OTHER; note = 2'-O-methyl modified nucleotide
  modified_base 13: mod_base = OTHER; note = 2'-O-methyl modified nucleotide
  modified_base 23: mod_base = OTHER; note = 2'-O-methyl modified nucleotide
  modified_base 25: mod_base = OTHER; note = 2'-O-methyl modified nucleotide
  modified_base 26: mod_base = OTHER; note = 2'-O-methyl modified nucleotide
  modified_base 27: mod_base = OTHER; note = 2'-O-methyl modified nucleotide
cgtagtttgaagccacaaaatccacag

SEQ ID NO: 1376 - RNA, 27 nt, synthetic construct
  source 1..27: mol_type = other RNA
  modified_base 1: mod_base = OTHER; note = 2'-O-methyl modified nucleotide
  modified_base 2: mod_base = OTHER; note = 2'-O-methyl modified nucleotide
  modified_base 3: mod_base = OTHER; note = 2'-O-methyl modified nucleotide
  modified_base 4: mod_base = OTHER; note = 2'-O-methyl modified nucleotide
  modified_base 11: mod_base = OTHER; note = 2'-O-methyl modified nucleotide
  modified_base 13: mod_base = OTHER; note = 2'-O-methyl modified nucleotide
  modified_base 23: mod_base = OTHER; note = 2'-O-methyl modified nucleotide
  modified_base 25: mod_base = OTHER; note = 2'-O-methyl modified nucleotide
  modified_base 26: mod_base = OTHER; note = 2'-O-methyl modified nucleotide
  modified_base 27: mod_base = OTHER; note = 2'-O-methyl modified nucleotide
tcgtatattgaagccacaaaatccaca

SEQ ID NO: 1377 - RNA, 27 nt, synthetic construct
  source 1..27: mol_type = other RNA
  modified_base 1: mod_base = OTHER; note = 2'-O-methyl modified nucleotide
  modified_base 2: mod_base = OTHER; note = 2'-O-methyl modified nucleotide
  modified_base 3: mod_base = OTHER; note = 2'-O-methyl modified nucleotide
  modified_base 4: mod_base = OTHER; note = 2'-O-methyl modified nucleotide
  modified_base 11: mod_base = OTHER; note = 2'-O-methyl modified nucleotide
  modified_base 13: mod_base = OTHER; note = 2'-O-methyl modified nucleotide
  modified_base 23: mod_base = OTHER; note = 2'-O-methyl modified nucleotide
  modified_base 25: mod_base = OTHER; note = 2'-O-methyl modified nucleotide
  modified_base 26: mod_base = OTHER; note = 2'-O-methyl modified nucleotide
  modified_base 27: mod_base = OTHER; note = 2'-O-methyl modified nucleotide
catcgtagattgaagccacaaaatcca

SEQ ID NO: 1378 - RNA, 27 nt, synthetic construct
  source 1..27: mol_type = other RNA
  modified_base 1: mod_base = OTHER; note = 2'-O-methyl modified nucleotide
  modified_base 2: mod_base = OTHER; note = 2'-O-methyl modified nucleotide
  modified_base 3: mod_base = OTHER; note = 2'-O-methyl modified nucleotide
  modified_base 4: mod_base = OTHER; note = 2'-O-methyl modified nucleotide
  modified_base 11: mod_base = OTHER; note = 2'-O-methyl modified nucleotide
  modified_base 13: mod_base = OTHER; note = 2'-O-methyl modified nucleotide
  modified_base 23: mod_base = OTHER; note = 2'-O-methyl modified nucleotide
  modified_base 25: mod_base = OTHER; note = 2'-O-methyl modified nucleotide
  modified_base 26: mod_base = OTHER; note = 2'-O-methyl modified nucleotide
  modified_base 27: mod_base = OTHER; note = 2'-O-methyl modified nucleotide
acatcttagattgaagccacaaaatcc

SEQ ID NO: 1379 - RNA, 27 nt, synthetic construct
  source 1..27: mol_type = other RNA
  modified_base 1: mod_base = OTHER; note = 2'-O-methyl modified nucleotide
  modified_base 2: mod_base = OTHER; note = 2'-O-methyl modified nucleotide
  modified_base 3: mod_base = OTHER; note = 2'-O-methyl modified nucleotide
  modified_base 4: mod_base = OTHER; note = 2'-O-methyl modified nucleotide
  modified_base 11: mod_base = OTHER; note = 2'-O-methyl modified nucleotide
  modified_base 13: mod_base = OTHER; note = 2'-O-methyl modified nucleotide
  modified_base 23: mod_base = OTHER; note = 2'-O-methyl modified nucleotide
  modified_base 25: mod_base = OTHER; note = 2'-O-methyl modified nucleotide
  modified_base 26: mod_base = OTHER; note = 2'-O-methyl modified nucleotide
  modified_base 27: mod_base = OTHER; note = 2'-O-methyl modified nucleotide
atagttaggatttagaaataagtggta

SEQ ID NO: 1380 - RNA, 27 nt, synthetic construct
  source 1..27: mol_type = other RNA
  modified_base 1: mod_base = OTHER; note = 2'-O-methyl modified nucleotide
  modified_base 2: mod_base = OTHER; note = 2'-O-methyl modified nucleotide
  modified_base 3: mod_base = OTHER; note = 2'-O-methyl modified nucleotide
  modified_base 4: mod_base = OTHER; note = 2'-O-methyl modified nucleotide
  modified_base 11: mod_base = OTHER; note = 2'-O-methyl modified nucleotide
  modified_base 13: mod_base = OTHER; note = 2'-O-methyl modified nucleotide
  modified_base 23: mod_base = OTHER; note = 2'-O-methyl modified nucleotide
  modified_base 25: mod_base = OTHER; note = 2'-O-methyl modified nucleotide
  modified_base 26: mod_base = OTHER; note = 2'-O-methyl modified nucleotide
  modified_base 27: mod_base = OTHER; note = 2'-O-methyl modified nucleotide
aatagtgaggatttagaaataagtggt

SEQ ID NO: 1381 - RNA, 27 nt, synthetic construct
  source 1..27: mol_type = other RNA
  modified_base 1: mod_base = OTHER; note = 2'-O-methyl modified nucleotide
  modified_base 2: mod_base = OTHER; note = 2'-O-methyl modified nucleotide
  modified_base 3: mod_base = OTHER; note = 2'-O-methyl modified nucleotide
  modified_base 4: mod_base = OTHER; note = 2'-O-methyl modified nucleotide
  modified_base 11: mod_base = OTHER; note = 2'-O-methyl modified nucleotide
  modified_base 13: mod_base = OTHER; note = 2'-O-methyl modified nucleotide
  modified_base 23: mod_base = OTHER; note = 2'-O-methyl modified nucleotide
  modified_base 25: mod_base = OTHER; note = 2'-O-methyl modified nucleotide
  modified_base 26: mod_base = OTHER; note = 2'-O-methyl modified nucleotide
  modified_base 27: mod_base = OTHER; note = 2'-O-methyl modified nucleotide
aaatattgaggatttagaaataagtgg

SEQ ID NO: 1382 - RNA, 27 nt, synthetic construct
  source 1..27: mol_type = other RNA
  modified_base 1: mod_base = OTHER; note = 2'-O-methyl modified nucleotide
  modified_base 2: mod_base = OTHER; note = 2'-O-methyl modified nucleotide
  modified_base 3: mod_base = OTHER; note = 2'-O-methyl modified nucleotide
  modified_base 4: mod_base = OTHER; note = 2'-O-methyl modified nucleotide
  modified_base 11: mod_base = OTHER; note = 2'-O-methyl modified nucleotide
  modified_base 13: mod_base = OTHER; note = 2'-O-methyl modified nucleotide
  modified_base 23: mod_base = OTHER; note = 2'-O-methyl modified nucleotide
  modified_base 25: mod_base = OTHER; note = 2'-O-methyl modified nucleotide
  modified_base 26: mod_base = OTHER; note = 2'-O-methyl modified nucleotide
  modified_base 27: mod_base = OTHER; note = 2'-O-methyl modified nucleotide
aaaattgtgaggatttagaaataagtg

SEQ ID NO: 1383 - RNA, 27 nt, synthetic construct
  source 1..27: mol_type = other RNA
  modified_base 1: mod_base = OTHER; note = 2'-O-methyl modified nucleotide
  modified_base 2: mod_base = OTHER; note = 2'-O-methyl modified nucleotide
  modified_base 3: mod_base = OTHER; note = 2'-O-methyl modified nucleotide
  modified_base 4: mod_base = OTHER; note = 2'-O-methyl modified nucleotide
  modified_base 11: mod_base = OTHER; note = 2'-O-methyl modified nucleotide
  modified_base 13: mod_base = OTHER; note = 2'-O-methyl modified nucleotide
  modified_base 23: mod_base = OTHER; note = 2'-O-methyl modified nucleotide
  modified_base 25: mod_base = OTHER; note = 2'-O-methyl modified nucleotide
  modified_base 26: mod_base = OTHER; note = 2'-O-methyl modified nucleotide
  modified_base 27: mod_base = OTHER; note = 2'-O-methyl modified nucleotide
aaaaattagtgaggatttagaaataag

SEQ ID NO: 1384 - RNA, 27 nt, synthetic construct
  source 1..27: mol_type = other RNA
  modified_base 1: mod_base = OTHER; note = 2'-O-methyl modified nucleotide
  modified_base 2: mod_base = OTHER; note = 2'-O-methyl modified nucleotide
  modified_base 3: mod_base = OTHER; note = 2'-O-methyl modified nucleotide
  modified_base 4: mod_base = OTHER; note = 2'-O-methyl modified nucleotide
  modified_base 11: mod_base = OTHER; note = 2'-O-methyl modified nucleotide
  modified_base 13: mod_base = OTHER; note = 2'-O-methyl modified nucleotide
  modified_base 23: mod_base = OTHER; note = 2'-O-methyl modified nucleotide
  modified_base 25: mod_base = OTHER; note = 2'-O-methyl modified nucleotide
  modified_base 26: mod_base = OTHER; note = 2'-O-methyl modified nucleotide
  modified_base 27: mod_base = OTHER; note = 2'-O-methyl modified nucleotide
aaaaatatagtgaggatttagaaataa

SEQ ID NO: 1385 - RNA, 27 nt, synthetic construct
  source 1..27: mol_type = other RNA
  modified_base 1: mod_base = OTHER; note = 2'-O-methyl modified nucleotide
  modified_base 2: mod_base = OTHER; note = 2'-O-methyl modified nucleotide
  modified_base 3: mod_base = OTHER; note = 2'-O-methyl modified nucleotide
  modified_base 4: mod_base = OTHER; note = 2'-O-methyl modified nucleotide
  modified_base 11: mod_base = OTHER; note = 2'-O-methyl modified nucleotide
  modified_base 13: mod_base = OTHER; note = 2'-O-methyl modified nucleotide
  modified_base 23: mod_base = OTHER; note = 2'-O-methyl modified nucleotide
  modified_base 25: mod_base = OTHER; note = 2'-O-methyl modified nucleotide
  modified_base 26: mod_base = OTHER; note = 2'-O-methyl modified nucleotide
  modified_base 27: mod_base = OTHER; note = 2'-O-methyl modified nucleotide
caaaataatagtgaggatttagaaata

SEQ ID NO: 1386 - RNA, 27 nt, synthetic construct
  source 1..27: mol_type = other RNA
  modified_base 1: mod_base = OTHER; note = 2'-O-methyl modified nucleotide
  modified_base 2: mod_base = OTHER; note = 2'-O-methyl modified nucleotide
  modified_base 3: mod_base = OTHER; note = 2'-O-methyl modified nucleotide
  modified_base 4: mod_base = OTHER; note = 2'-O-methyl modified nucleotide
  modified_base 11: mod_base = OTHER; note = 2'-O-methyl modified nucleotide
  modified_base 13: mod_base = OTHER; note = 2'-O-methyl modified nucleotide
  modified_base 23: mod_base = OTHER; note = 2'-O-methyl modified nucleotide
  modified_base 25: mod_base = OTHER; note = 2'-O-methyl modified nucleotide
  modified_base 26: mod_base = OTHER; note = 2'-O-methyl modified nucleotide
  modified_base 27: mod_base = OTHER; note = 2'-O-methyl modified nucleotide
acaaataaatagtgaggatttagaaat

SEQ ID NO: 1387 - RNA, 27 nt, synthetic construct
  source 1..27: mol_type = other RNA
  modified_base 1: mod_base = OTHER; note = 2'-O-methyl modified nucleotide
  modified_base 2: mod_base = OTHER; note = 2'-O-methyl modified nucleotide
  modified_base 3: mod_base = OTHER; note = 2'-O-methyl modified nucleotide
  modified_base 4: mod_base = OTHER; note = 2'-O-methyl modified nucleotide
  modified_base 11: mod_base = OTHER; note = 2'-O-methyl modified nucleotide
  modified_base 13: mod_base = OTHER; note = 2'-O-methyl modified nucleotide
  modified_base 23: mod_base = OTHER; note = 2'-O-methyl modified nucleotide
  modified_base 25: mod_base = OTHER; note = 2'-O-methyl modified nucleotide
  modified_base 26: mod_base = OTHER; note = 2'-O-methyl modified nucleotide
  modified_base 27: mod_base = OTHER; note = 2'-O-methyl modified nucleotide
aacaataaaatagtgaggatttagaaa

SEQ ID NO: 1388 - RNA, 27 nt, synthetic construct
  source 1..27: mol_type = other RNA
  modified_base 1: mod_base = OTHER; note = 2'-O-methyl modified nucleotide
  modified_base 2: mod_base = OTHER; note = 2'-O-methyl modified nucleotide
  modified_base 3: mod_base = OTHER; note = 2'-O-methyl modified nucleotide
  modified_base 4: mod_base = OTHER; note = 2'-O-methyl modified nucleotide
  modified_base 11: mod_base = OTHER; note = 2'-O-methyl modified nucleotide
  modified_base 13: mod_base = OTHER; note = 2'-O-methyl modified nucleotide
  modified_base 23: mod_base = OTHER; note = 2'-O-methyl modified nucleotide
  modified_base 25: mod_base = OTHER; note = 2'-O-methyl modified nucleotide
  modified_base 26: mod_base = OTHER; note = 2'-O-methyl modified nucleotide
  modified_base 27: mod_base = OTHER; note = 2'-O-methyl modified nucleotide
caacataaaaatagtgaggatttagaa

SEQ ID NO: 1389 - RNA, 27 nt, synthetic construct
  source 1..27: mol_type = other RNA
  modified_base 1: mod_base = OTHER; note = 2'-O-methyl modified nucleotide
  modified_base 2: mod_base = OTHER; note = 2'-O-methyl modified nucleotide
  modified_base 3: mod_base = OTHER; note = 2'-O-methyl modified nucleotide
  modified_base 4: mod_base = OTHER; note = 2'-O-methyl modified nucleotide
  modified_base 11: mod_base = OTHER; note = 2'-O-methyl modified nucleotide
  modified_base 13: mod_base = OTHER; note = 2'-O-methyl modified nucleotide
  modified_base 23: mod_base = OTHER; note = 2'-O-methyl modified nucleotide
  modified_base 25: mod_base = OTHER; note = 2'-O-methyl modified nucleotide
  modified_base 26: mod_base = OTHER; note = 2'-O-methyl modified nucleotide
  modified_base 27: mod_base = OTHER; note = 2'-O-methyl modified nucleotide
gcaactaaaaaatagtgaggatttaga

SEQ ID NO: 1390 - RNA, 27 nt, synthetic construct
  source 1..27: mol_type = other RNA
  modified_base 1: mod_base = OTHER; note = 2'-O-methyl modified nucleotide
  modified_base 2: mod_base = OTHER; note = 2'-O-methyl modified nucleotide
  modified_base 3: mod_base = OTHER; note = 2'-O-methyl modified nucleotide
  modified_base 4: mod_base = OTHER; note = 2'-O-methyl modified nucleotide
  modified_base 11: mod_base = OTHER; note = 2'-O-methyl modified nucleotide
  modified_base 13: mod_base = OTHER; note = 2'-O-methyl modified nucleotide
  modified_base 23: mod_base = OTHER; note = 2'-O-methyl modified nucleotide
  modified_base 25: mod_base = OTHER; note = 2'-O-methyl modified nucleotide
  modified_base 26: mod_base = OTHER; note = 2'-O-methyl modified nucleotide
  modified_base 27: mod_base = OTHER; note = 2'-O-methyl modified nucleotide
agcaataaaaaaatagtgaggatttag

SEQ ID NO: 1391 - RNA, 27 nt, synthetic construct
  source 1..27: mol_type = other RNA
  modified_base 1: mod_base = OTHER; note = 2'-O-methyl modified nucleotide
  modified_base 2: mod_base = OTHER; note = 2'-O-methyl modified nucleotide
  modified_base 3: mod_base = OTHER; note = 2'-O-methyl modified nucleotide
  modified_base 4: mod_base = OTHER; note = 2'-O-methyl modified nucleotide
  modified_base 11: mod_base = OTHER; note = 2'-O-methyl modified nucleotide
  modified_base 13: mod_base = OTHER; note = 2'-O-methyl modified nucleotide
  modified_base 23: mod_base = OTHER; note = 2'-O-methyl modified nucleotide
  modified_base 25: mod_base = OTHER; note = 2'-O-methyl modified nucleotide
  modified_base 26: mod_base = OTHER; note = 2'-O-methyl modified nucleotide
  modified_base 27: mod_base = OTHER; note = 2'-O-methyl modified nucleotide
cagcatcaaaaaaatagtgaggattta

SEQ ID NO: 1392 - RNA, 27 nt, synthetic construct
  source 1..27: mol_type = other RNA
  modified_base 1: mod_base = OTHER; note = 2'-O-methyl modified nucleotide
  modified_base 2: mod_base = OTHER; note = 2'-O-methyl modified nucleotide
  modified_base 3: mod_base = OTHER; note = 2'-O-methyl modified nucleotide
  modified_base 4: mod_base = OTHER; note = 2'-O-methyl modified nucleotide
  modified_base 11: mod_base = OTHER; note = 2'-O-methyl modified nucleotide
  modified_base 13: mod_base = OTHER; note = 2'-O-methyl modified nucleotide
  modified_base 23: mod_base = OTHER; note = 2'-O-methyl modified nucleotide
  modified_base 25: mod_base = OTHER; note = 2'-O-methyl modified nucleotide
  modified_base 26: mod_base = OTHER; note = 2'-O-methyl modified nucleotide
  modified_base 27: mod_base = OTHER; note = 2'-O-methyl modified nucleotide
acagctacaaaaaaatagtgaggattt

SEQ ID NO: 1393 - RNA, 27 nt, synthetic construct
  source 1..27: mol_type = other RNA
  modified_base 1: mod_base = OTHER; note = 2'-O-methyl modified nucleotide
  modified_base 2: mod_base = OTHER; note = 2'-O-methyl modified nucleotide
  modified_base 3: mod_base = OTHER; note = 2'-O-methyl modified nucleotide
  modified_base 4: mod_base = OTHER; note = 2'-O-methyl modified nucleotide
  modified_base 11: mod_base = OTHER; note = 2'-O-methyl modified nucleotide
  modified_base 13: mod_base = OTHER; note = 2'-O-methyl modified nucleotide
  modified_base 23: mod_base = OTHER; note = 2'-O-methyl modified nucleotide
  modified_base 25: mod_base = OTHER; note = 2'-O-methyl modified nucleotide
  modified_base 26: mod_base = OTHER; note = 2'-O-methyl modified nucleotide
  modified_base 27: mod_base = OTHER; note = 2'-O-methyl modified nucleotide
aacagtaacaaaaaaatagtgaggatt

SEQ ID NO: 1394 - RNA, 27 nt, synthetic construct
  source 1..27: mol_type = other RNA
  modified_base 1: mod_base = OTHER; note = 2'-O-methyl modified nucleotide
  modified_base 2: mod_base = OTHER; note = 2'-O-methyl modified nucleotide
  modified_base 3: mod_base = OTHER; note = 2'-O-methyl modified nucleotide
  modified_base 4: mod_base = OTHER; note = 2'-O-methyl modified nucleotide
  modified_base 11: mod_base = OTHER; note = 2'-O-methyl modified nucleotide
  modified_base 13: mod_base = OTHER; note = 2'-O-methyl modified nucleotide
  modified_base 23: mod_base = OTHER; note = 2'-O-methyl modified nucleotide
  modified_base 25: mod_base = OTHER; note = 2'-O-methyl modified nucleotide
  modified_base 26: mod_base = OTHER; note = 2'-O-methyl modified nucleotide
  modified_base 27: mod_base = OTHER; note = 2'-O-methyl modified nucleotide
caacatcaacaaaaaaatagtgaggat

SEQ ID NO: 1395 - RNA, 27 nt, synthetic construct
  source 1..27: mol_type = other RNA
  modified_base 1: mod_base = OTHER; note = 2'-O-methyl modified nucleotide
  modified_base 2: mod_base = OTHER; note = 2'-O-methyl modified nucleotide
  modified_base 3: mod_base = OTHER; note = 2'-O-methyl modified nucleotide
  modified_base 4: mod_base = OTHER; note = 2'-O-methyl modified nucleotide
  modified_base 11: mod_base = OTHER; note = 2'-O-methyl modified nucleotide
  modified_base 13: mod_base = OTHER; note = 2'-O-methyl modified nucleotide
  modified_base 23: mod_base = OTHER; note = 2'-O-methyl modified nucleotide
  modified_base 25: mod_base = OTHER; note = 2'-O-methyl modified nucleotide
  modified_base 26: mod_base = OTHER; note = 2'-O-methyl modified nucleotide
  modified_base 27: mod_base = OTHER; note = 2'-O-methyl modified nucleotide
acaactgcaacaaaaaaatagtgagga

SEQ ID NO: 1396 - RNA, 27 nt, synthetic construct
  source 1..27: mol_type = other RNA
  modified_base 1: mod_base = OTHER; note = 2'-O-methyl modified nucleotide
  modified_base 2: mod_base = OTHER; note = 2'-O-methyl modified nucleotide
  modified_base 3: mod_base = OTHER; note = 2'-O-methyl modified nucleotide
  modified_base 4: mod_base = OTHER; note = 2'-O-methyl modified nucleotide
  modified_base 11: mod_base = OTHER; note = 2'-O-methyl modified nucleotide
  modified_base 13: mod_base = OTHER; note = 2'-O-methyl modified nucleotide
  modified_base 23: mod_base = OTHER; note = 2'-O-methyl modified nucleotide
  modified_base 25: mod_base = OTHER; note = 2'-O-methyl modified nucleotide
  modified_base 26: mod_base = OTHER; note = 2'-O-methyl modified nucleotide
  modified_base 27: mod_base = OTHER; note = 2'-O-methyl modified nucleotide
aacaatagcaacaaaaaaatagtgagg

SEQ ID NO: 1397 - RNA, 27 nt, synthetic construct
  source 1..27: mol_type = other RNA
  modified_base 1: mod_base = OTHER; note = 2'-O-methyl modified nucleotide
  modified_base 2: mod_base = OTHER; note = 2'-O-methyl modified nucleotide
  modified_base 3: mod_base = OTHER; note = 2'-O-methyl modified nucleotide
  modified_base 4: mod_base = OTHER; note = 2'-O-methyl modified nucleotide
  modified_base 11: mod_base = OTHER; note = 2'-O-methyl modified nucleotide
  modified_base 13: mod_base = OTHER; note = 2'-O-methyl modified nucleotide
  modified_base 23: mod_base = OTHER; note = 2'-O-methyl modified nucleotide
  modified_base 25: mod_base = OTHER; note = 2'-O-methyl modified nucleotide
  modified_base 26: mod_base = OTHER; note = 2'-O-methyl modified nucleotide
  modified_base 27: mod_base = OTHER; note = 2'-O-methyl modified nucleotide
gaacatcagcaacaaaaaaatagtgag

SEQ ID NO: 1398 - RNA, 27 nt, synthetic construct
  source 1..27: mol_type = other RNA
  modified_base 1: mod_base = OTHER; note = 2'-O-methyl modified nucleotide
  modified_base 2: mod_base = OTHER; note = 2'-O-methyl modified nucleotide
  modified_base 3: mod_base = OTHER; note = 2'-O-methyl modified nucleotide
  modified_base 4: mod_base = OTHER; note = 2'-O-methyl modified nucleotide
  modified_base 11: mod_base = OTHER; note = 2'-O-methyl modified nucleotide
  modified_base 13: mod_base = OTHER; note = 2'-O-methyl modified nucleotide
  modified_base 23: mod_base = OTHER; note = 2'-O-methyl modified nucleotide
  modified_base 25: mod_base = OTHER; note = 2'-O-methyl modified nucleotide
  modified_base 26: mod_base = OTHER; note = 2'-O-methyl modified nucleotide
  modified_base 27: mod_base = OTHER; note = 2'-O-methyl modified nucleotide
tgaactacagcaacaaaaaaatagtga

SEQ ID NO: 1399 - RNA, 27 nt, synthetic construct
  source 1..27: mol_type = other RNA
  modified_base 1: mod_base = OTHER; note = 2'-O-methyl modified nucleotide
  modified_base 2: mod_base = OTHER; note = 2'-O-methyl modified nucleotide
  modified_base 3: mod_base = OTHER; note = 2'-O-methyl modified nucleotide
  modified_base 4: mod_base = OTHER; note = 2'-O-methyl modified nucleotide
  modified_base 11: mod_base = OTHER; note = 2'-O-methyl modified nucleotide
  modified_base 13: mod_base = OTHER; note = 2'-O-methyl modified nucleotide
  modified_base 23: mod_base = OTHER; note = 2'-O-methyl modified nucleotide
  modified_base 25: mod_base = OTHER; note = 2'-O-methyl modified nucleotide
  modified_base 26: mod_base = OTHER; note = 2'-O-methyl modified nucleotide
  modified_base 27: mod_base = OTHER; note = 2'-O-methyl modified nucleotide
ctgaataacagcaacaaaaaaatagtg

SEQ ID NO: 1400 - RNA, 27 nt, synthetic construct
  source 1..27: mol_type = other RNA
  modified_base 1: mod_base = OTHER; note = 2'-O-methyl modified nucleotide
  modified_base 2: mod_base = OTHER; note = 2'-O-methyl modified nucleotide
  modified_base 3: mod_base = OTHER; note = 2'-O-methyl modified nucleotide
  modified_base 4: mod_base = OTHER; note = 2'-O-methyl modified nucleotide
  modified_base 11: mod_base = OTHER; note = 2'-O-methyl modified nucleotide
  modified_base 13: mod_base = OTHER; note = 2'-O-methyl modified nucleotide
  modified_base 23: mod_base = OTHER; note = 2'-O-methyl modified nucleotide
  modified_base 25: mod_base = OTHER; note = 2'-O-methyl modified nucleotide
  modified_base 26: mod_base = OTHER; note = 2'-O-methyl modified nucleotide
  modified_base 27: mod_base = OTHER; note = 2'-O-methyl modified nucleotide
tctgatcaacagcaacaaaaaaatagt

SEQ ID NO: 1401 - RNA, 27 nt, synthetic construct
  source 1..27: mol_type = other RNA
  modified_base 1: mod_base = OTHER; note = 2'-O-methyl modified nucleotide
  modified_base 2: mod_base = OTHER; note = 2'-O-methyl modified nucleotide
  modified_base 3: mod_base = OTHER; note = 2'-O-methyl modified nucleotide
  modified_base 4: mod_base = OTHER; note = 2'-O-methyl modified nucleotide
  modified_base 11: mod_base = OTHER; note = 2'-O-methyl modified nucleotide
  modified_base 13: mod_base = OTHER; note = 2'-O-methyl modified nucleotide
  modified_base 23: mod_base = OTHER; note = 2'-O-methyl modified nucleotide
  modified_base 25: mod_base = OTHER; note = 2'-O-methyl modified nucleotide
  modified_base 26: mod_base = OTHER; note = 2'-O-methyl modified nucleotide
  modified_base 27: mod_base = OTHER; note = 2'-O-methyl modified nucleotide
ttctgtacaacagcaacaaaaaaatag

SEQ ID NO: 1402 - RNA, 27 nt, synthetic construct
  source 1..27: mol_type = other RNA
  modified_base 1: mod_base = OTHER; note = 2'-O-methyl modified nucleotide
  modified_base 2: mod_base = OTHER; note = 2'-O-methyl modified nucleotide
  modified_base 3: mod_base = OTHER; note = 2'-O-methyl modified nucleotide
  modified_base 4: mod_base = OTHER; note = 2'-O-methyl modified nucleotide
  modified_base 11: mod_base = OTHER; note = 2'-O-methyl modified nucleotide
  modified_base 13: mod_base = OTHER; note = 2'-O-methyl modified nucleotide
  modified_base 23: mod_base = OTHER; note = 2'-O-methyl modified nucleotide
  modified_base 25: mod_base = OTHER; note = 2'-O-methyl modified nucleotide
  modified_base 26: mod_base = OTHER; note = 2'-O-methyl modified nucleotide
  modified_base 27: mod_base = OTHER; note = 2'-O-methyl modified nucleotide
cttcttaacaacagcaacaaaaaaata

SEQ ID NO: 1403 - RNA, 27 nt, synthetic construct
  source 1..27: mol_type = other RNA
  modified_base 1: mod_base = OTHER; note = 2'-O-methyl modified nucleotide
  modified_base 2: mod_base = OTHER; note = 2'-O-methyl modified nucleotide
  modified_base 3: mod_base = OTHER; note = 2'-O-methyl modified nucleotide
  modified_base 4: mod_base = OTHER; note = 2'-O-methyl modified nucleotide
  modified_base 11: mod_base = OTHER; note = 2'-O-methyl modified nucleotide
  modified_base 13: mod_base = OTHER; note = 2'-O-methyl modified nucleotide
  modified_base 23: mod_base = OTHER; note = 2'-O-methyl modified nucleotide
  modified_base 25: mod_base = OTHER; note = 2'-O-methyl modified nucleotide
  modified_base 26: mod_base = OTHER; note = 2'-O-methyl modified nucleotide
  modified_base 27: mod_base = OTHER; note = 2'-O-methyl modified nucleotide
acttctgaacaacagcaacaaaaaaat

SEQ ID NO: 1404 - RNA, 27 nt, synthetic construct
  source 1..27: mol_type = other RNA
  modified_base 1: mod_base = OTHER; note = 2'-O-methyl modified nucleotide
  modified_base 2: mod_base = OTHER; note = 2'-O-methyl modified nucleotide
  modified_base 3: mod_base = OTHER; note = 2'-O-methyl modified nucleotide
  modified_base 4: mod_base = OTHER; note = 2'-O-methyl modified nucleotide
  modified_base 11: mod_base = OTHER; note = 2'-O-methyl modified nucleotide
  modified_base 13: mod_base = OTHER; note = 2'-O-methyl modified nucleotide
  modified_base 23: mod_base = OTHER; note = 2'-O-methyl modified nucleotide
  modified_base 25: mod_base = OTHER; note = 2'-O-methyl modified nucleotide
  modified_base 26: mod_base = OTHER; note = 2'-O-methyl modified nucleotide
  modified_base 27: mod_base = OTHER; note = 2'-O-methyl modified nucleotide
aacttttgaacaacagcaacaaaaaaa

SEQ ID NO: 1405 - RNA, 27 nt, synthetic construct
  source 1..27: mol_type = other RNA
  modified_base 1: mod_base = OTHER; note = 2'-O-methyl modified nucleotide
  modified_base 2: mod_base = OTHER; note = 2'-O-methyl modified nucleotide
  modified_base 3: mod_base = OTHER; note = 2'-O-methyl modified nucleotide
  modified_base 4: mod_base = OTHER; note = 2'-O-methyl modified nucleotide
  modified_base 11: mod_base = OTHER; note = 2'-O-methyl modified nucleotide
  modified_base 13: mod_base = OTHER; note = 2'-O-methyl modified nucleotide
  modified_base 23: mod_base = OTHER; note = 2'-O-methyl modified nucleotide
  modified_base 25: mod_base = OTHER; note = 2'-O-methyl modified nucleotide
  modified_base 26: mod_base = OTHER; note = 2'-O-methyl modified nucleotide
  modified_base 27: mod_base = OTHER; note = 2'-O-methyl modified nucleotide
caacttctgaacaacagcaacaaaaaa

SEQ ID NO: 1406 - RNA, 27 nt, synthetic construct
  source 1..27: mol_type = other RNA
  modified_base 1: mod_base = OTHER; note = 2'-O-methyl modified nucleotide
  modified_base 2: mod_base = OTHER; note = 2'-O-methyl modified nucleotide
  modified_base 3: mod_base = OTHER; note = 2'-O-methyl modified nucleotide
  modified_base 4: mod_base = OTHER; note = 2'-O-methyl modified nucleotide
  modified_base 11: mod_base = OTHER; note = 2'-O-methyl modified nucleotide
  modified_base 13: mod_base = OTHER; note = 2'-O-methyl modified nucleotide
  modified_base 23: mod_base = OTHER; note = 2'-O-methyl modified nucleotide
  modified_base 25: mod_base = OTHER; note = 2'-O-methyl modified nucleotide
  modified_base 26: mod_base = OTHER; note = 2'-O-methyl modified nucleotide
  modified_base 27: mod_base = OTHER; note = 2'-O-methyl modified nucleotide
acaacttctgaacaacagcaacaaaaa

SEQ ID NO: 1407 - RNA, 27 nt, synthetic construct
  source 1..27: mol_type = other RNA
  modified_base 1: mod_base = OTHER; note = 2'-O-methyl modified nucleotide
  modified_base 2: mod_base = OTHER; note = 2'-O-methyl modified nucleotide
  modified_base 3: mod_base = OTHER; note = 2'-O-methyl modified nucleotide
  modified_base 4: mod_base = OTHER; note = 2'-O-methyl modified nucleotide
  modified_base 11: mod_base = OTHER; note = 2'-O-methyl modified nucleotide
  modified_base 13: mod_base = OTHER; note = 2'-O-methyl modified nucleotide
  modified_base 23: mod_base = OTHER; note = 2'-O-methyl modified nucleotide
  modified_base 25: mod_base = OTHER; note = 2'-O-methyl modified nucleotide
  modified_base 26: mod_base = OTHER; note = 2'-O-methyl modified nucleotide
  modified_base 27: mod_base = OTHER; note = 2'-O-methyl modified nucleotide
aacaatttctgaacaacagcaacaaaa

SEQ ID NO: 1408 - RNA, 27 nt, synthetic construct
  source 1..27: mol_type = other RNA
  modified_base 1: mod_base = OTHER; note = 2'-O-methyl modified nucleotide
  modified_base 2: mod_base = OTHER; note = 2'-O-methyl modified nucleotide
  modified_base 3: mod_base = OTHER; note = 2'-O-methyl modified nucleotide
  modified_base 4: mod_base = OTHER; note = 2'-O-methyl modified nucleotide
  modified_base 11: mod_base = OTHER; note = 2'-O-methyl modified nucleotide
  modified_base 13: mod_base = OTHER; note = 2'-O-methyl modified nucleotide
  modified_base 23: mod_base = OTHER; note = 2'-O-methyl modified nucleotide
  modified_base 25: mod_base = OTHER; note = 2'-O-methyl modified nucleotide
  modified_base 26: mod_base = OTHER; note = 2'-O-methyl modified nucleotide
  modified_base 27: mod_base = OTHER; note = 2'-O-methyl modified nucleotide
taacatcttctgaacaacagcaacaaa

SEQ ID NO: 1409 - RNA, 27 nt, synthetic construct
  source 1..27: mol_type = other RNA
  modified_base 1: mod_base = OTHER; note = 2'-O-methyl modified nucleotide
  modified_base 2: mod_base = OTHER; note = 2'-O-methyl modified nucleotide
  modified_base 3: mod_base = OTHER; note = 2'-O-methyl modified nucleotide
  modified_base 4: mod_base = OTHER; note = 2'-O-methyl modified nucleotide
  modified_base 11: mod_base = OTHER; note = 2'-O-methyl modified nucleotide
  modified_base 13: mod_base = OTHER; note = 2'-O-methyl modified nucleotide
  modified_base 23: mod_base = OTHER; note = 2'-O-methyl modified nucleotide
  modified_base 25: mod_base = OTHER; note = 2'-O-methyl modified nucleotide
  modified_base 26: mod_base = OTHER; note = 2'-O-methyl modified nucleotide
  modified_base 27: mod_base = OTHER; note = 2'-O-methyl modified nucleotide
ctaactacttctgaacaacagcaacaa

SEQ ID NO: 1410 - RNA, 27 nt, synthetic construct
  source 1..27: mol_type = other RNA
  modified_base 1: mod_base = OTHER; note = 2'-O-methyl modified nucleotide
  modified_base 2: mod_base = OTHER; note = 2'-O-methyl modified nucleotide
  modified_base 3: mod_base = OTHER; note = 2'-O-methyl modified nucleotide
  modified_base 4: mod_base = OTHER; note = 2'-O-methyl modified nucleotide
  modified_base 11: mod_base = OTHER; note = 2'-O-methyl modified nucleotide
  modified_base 13: mod_base = OTHER; note = 2'-O-methyl modified nucleotide
  modified_base 23: mod_base = OTHER; note = 2'-O-methyl modified nucleotide
  modified_base 25: mod_base = OTHER; note = 2'-O-methyl modified nucleotide
  modified_base 26: mod_base = OTHER; note = 2'-O-methyl modified nucleotide
  modified_base 27: mod_base = OTHER; note = 2'-O-methyl modified nucleotide
actaataacttctgaacaacagcaaca

SEQ ID NO: 1411 - RNA, 27 nt, synthetic construct
  source 1..27: mol_type = other RNA
  modified_base 1: mod_base = OTHER; note = 2'-O-methyl modified nucleotide
  modified_base 2: mod_base = OTHER; note = 2'-O-methyl modified nucleotide
  modified_base 3: mod_base = OTHER; note = 2'-O-methyl modified nucleotide
  modified_base 4: mod_base = OTHER; note = 2'-O-methyl modified nucleotide
  modified_base 11: mod_base = OTHER; note = 2'-O-methyl modified nucleotide
  modified_base 13: mod_base = OTHER; note = 2'-O-methyl modified nucleotide
  modified_base 23: mod_base = OTHER; note = 2'-O-methyl modified nucleotide
  modified_base 25: mod_base = OTHER; note = 2'-O-methyl modified nucleotide
  modified_base 26: mod_base = OTHER; note = 2'-O-methyl modified nucleotide
  modified_base 27: mod_base = OTHER; note = 2'-O-methyl modified nucleotide
cactatcaacttctgaacaacagcaac

SEQ ID NO: 1412 - RNA, 27 nt, synthetic construct
  source 1..27: mol_type = other RNA
  modified_base 1: mod_base = OTHER; note = 2'-O-methyl modified nucleotide
  modified_base 2: mod_base = OTHER; note = 2'-O-methyl modified nucleotide
  modified_base 3: mod_base = OTHER; note = 2'-O-methyl modified nucleotide
  modified_base 4: mod_base = OTHER; note = 2'-O-methyl modified nucleotide
  modified_base 11: mod_base = OTHER; note = 2'-O-methyl modified nucleotide
  modified_base 13: mod_base = OTHER; note = 2'-O-methyl modified nucleotide
  modified_base 23: mod_base = OTHER; note = 2'-O-methyl modified nucleotide
  modified_base 25: mod_base = OTHER; note = 2'-O-methyl modified nucleotide
  modified_base 26: mod_base = OTHER; note = 2'-O-methyl modified nucleotide
  modified_base 27: mod_base = OTHER; note = 2'-O-methyl modified nucleotide
tcacttacaacttctgaacaacagcaa

SEQ ID NO: 1413 - RNA, 27 nt, synthetic construct
  source 1..27: mol_type = other RNA
  modified_base 1: mod_base = OTHER; note = 2'-O-methyl modified nucleotide
  modified_base 2: mod_base = OTHER; note = 2'-O-methyl modified nucleotide
  modified_base 3: mod_base = OTHER; note = 2'-O-methyl modified nucleotide
  modified_base 4: mod_base = OTHER; note = 2'-O-methyl modified nucleotide
  modified_base 11: mod_base = OTHER; note = 2'-O-methyl modified nucleotide
  modified_base 13: mod_base = OTHER; note = 2'-O-methyl modified nucleotide
  modified_base 23: mod_base = OTHER; note = 2'-O-methyl modified nucleotide
  modified_base 25: mod_base = OTHER; note = 2'-O-methyl modified nucleotide
  modified_base 26: mod_base = OTHER; note = 2'-O-methyl modified nucleotide
  modified_base 27: mod_base = OTHER; note = 2'-O-methyl modified nucleotide
atcactaacaacttctgaacaacagca

SEQ ID NO: 1414 - RNA, 27 nt, synthetic construct
  source 1..27: mol_type = other RNA
  modified_base 1: mod_base = OTHER; note = 2'-O-methyl modified nucleotide
  modified_base 2: mod_base = OTHER; note = 2'-O-methyl modified nucleotide
  modified_base 3: mod_base = OTHER; note = 2'-O-methyl modified nucleotide
  modified_base 4: mod_base = OTHER; note = 2'-O-methyl modified nucleotide
  modified_base 11: mod_base = OTHER; note = 2'-O-methyl modified nucleotide
  modified_base 13: mod_base = OTHER; note = 2'-O-methyl modified nucleotide
  modified_base 23: mod_base = OTHER; note = 2'-O-methyl modified nucleotide
  modified_base 25: mod_base = OTHER; note = 2'-O-methyl modified nucleotide
  modified_base 26: mod_base = OTHER; note = 2'-O-methyl modified nucleotide
  modified_base 27: mod_base = OTHER; note = 2'-O-methyl modified nucleotide
aatcattaacaacttctgaacaacagc

SEQ ID NO: 1415 - RNA, 27 nt, synthetic construct
  source 1..27: mol_type = other RNA
  modified_base 1: mod_base = OTHER; note = 2'-O-methyl modified nucleotide
  modified_base 2: mod_base = OTHER; note = 2'-O-methyl modified nucleotide
  modified_base 3: mod_base = OTHER; note = 2'-O-methyl modified nucleotide
  modified_base 4: mod_base = OTHER; note = 2'-O-methyl modified nucleotide
  modified_base 11: mod_base = OTHER; note = 2'-O-methyl modified nucleotide
  modified_base 13: mod_base = OTHER; note = 2'-O-methyl modified nucleotide
  modified_base 23: mod_base = OTHER; note = 2'-O-methyl modified nucleotide
  modified_base 25: mod_base = OTHER; note = 2'-O-methyl modified nucleotide
  modified_base 26: mod_base = OTHER; note = 2'-O-methyl modified nucleotide
  modified_base 27: mod_base = OTHER; note = 2'-O-methyl modified nucleotide
aaatctctaacaacttctgaacaacag

SEQ ID NO: 1416 - RNA, 27 nt, synthetic construct
  source 1..27: mol_type = other RNA
  modified_base 1: mod_base = OTHER; note = 2'-O-methyl modified nucleotide
  modified_base 2: mod_base = OTHER; note = 2'-O-methyl modified nucleotide
  modified_base 3: mod_base = OTHER; note = 2'-O-methyl modified nucleotide
  modified_base 4: mod_base = OTHER; note = 2'-O-methyl modified nucleotide
  modified_base 11: mod_base = OTHER; note = 2'-O-methyl modified nucleotide
  modified_base 13: mod_base = OTHER; note = 2'-O-methyl modified nucleotide
  modified_base 23: mod_base = OTHER; note = 2'-O-methyl modified nucleotide
  modified_base 25: mod_base = OTHER; note = 2'-O-methyl modified nucleotide
  modified_base 26: mod_base = OTHER; note = 2'-O-methyl modified nucleotide
  modified_base 27: mod_base = OTHER; note = 2'-O-methyl modified nucleotide
caaattactaacaacttctgaacaaca

SEQ ID NO: 1417 - RNA, 27 nt, synthetic construct
  source 1..27: mol_type = other RNA
  modified_base 1: mod_base = OTHER; note = 2'-O-methyl modified nucleotide
  modified_base 2: mod_base = OTHER; note = 2'-O-methyl modified nucleotide
  modified_base 3: mod_base = OTHER; note = 2'-O-methyl modified nucleotide
  modified_base 4: mod_base = OTHER; note = 2'-O-methyl modified nucleotide
  modified_base 11: mod_base = OTHER; note = 2'-O-methyl modified nucleotide
  modified_base 13: mod_base = OTHER; note = 2'-O-methyl modified nucleotide
  modified_base 23: mod_base = OTHER; note = 2'-O-methyl modified nucleotide
  modified_base 25: mod_base = OTHER; note = 2'-O-methyl modified nucleotide
  modified_base 26: mod_base = OTHER; note = 2'-O-methyl modified nucleotide
  modified_base 27: mod_base = OTHER; note = 2'-O-methyl modified nucleotide
gcaaatcactaacaacttctgaacaac

SEQ ID NO: 1418 - RNA, 27 nt, synthetic construct
  source 1..27: mol_type = other RNA
  modified_base 1: mod_base = OTHER; note = 2'-O-methyl modified nucleotide
  modified_base 2: mod_base = OTHER; note = 2'-O-methyl modified nucleotide
  modified_base 3: mod_base = OTHER; note = 2'-O-methyl modified nucleotide
  modified_base 4: mod_base = OTHER; note = 2'-O-methyl modified nucleotide
  modified_base 11: mod_base = OTHER; note = 2'-O-methyl modified nucleotide
  modified_base 13: mod_base = OTHER; note = 2'-O-methyl modified nucleotide
  modified_base 23: mod_base = OTHER; note = 2'-O-methyl modified nucleotide
  modified_base 25: mod_base = OTHER; note = 2'-O-methyl modified nucleotide
  modified_base 26: mod_base = OTHER; note = 2'-O-methyl modified nucleotide
  modified_base 27: mod_base = OTHER; note = 2'-O-methyl modified nucleotide
agcaattcactaacaacttctgaacaa

SEQ ID NO: 1419 - RNA, 27 nt, synthetic construct
  source 1..27: mol_type = other RNA
  modified_base 1: mod_base = OTHER; note = 2'-O-methyl modified nucleotide
  modified_base 2: mod_base = OTHER; note = 2'-O-methyl modified nucleotide
  modified_base 3: mod_base = OTHER; note = 2'-O-methyl modified nucleotide
  modified_base 4: mod_base = OTHER; note = 2'-O-methyl modified nucleotide
  modified_base 11: mod_base = OTHER; note = 2'-O-methyl modified nucleotide
  modified_base 13: mod_base = OTHER; note = 2'-O-methyl modified nucleotide
  modified_base 23: mod_base = OTHER; note = 2'-O-methyl modified nucleotide
  modified_base 25: mod_base = OTHER; note = 2'-O-methyl modified nucleotide
  modified_base 26: mod_base = OTHER; note = 2'-O-methyl modified nucleotide
  modified_base 27: mod_base = OTHER; note = 2'-O-methyl modified nucleotide
tagcatatcactaacaacttctgaaca

SEQ ID NO: 1420 - RNA, 27 nt, synthetic construct
  source 1..27: mol_type = other RNA
  modified_base 1: mod_base = OTHER; note = 2'-O-methyl modified nucleotide
  modified_base 2: mod_base = OTHER; note = 2'-O-methyl modified nucleotide
  modified_base 3: mod_base = OTHER; note = 2'-O-methyl modified nucleotide
  modified_base 4: mod_base = OTHER; note = 2'-O-methyl modified nucleotide
  modified_base 11: mod_base = OTHER; note = 2'-O-methyl modified nucleotide
  modified_base 13: mod_base = OTHER; note = 2'-O-methyl modified nucleotide
  modified_base 23: mod_base = OTHER; note = 2'-O-methyl modified nucleotide
  modified_base 25: mod_base = OTHER; note = 2'-O-methyl modified nucleotide
  modified_base 26: mod_base = OTHER; note = 2'-O-methyl modified nucleotide
  modified_base 27: mod_base = OTHER; note = 2'-O-methyl modified nucleotide
atagctaatcactaacaacttctgaac

SEQ ID NO: 1421 - RNA, 27 nt, synthetic construct
  source 1..27: mol_type = other RNA
  modified_base 1: mod_base = OTHER; note = 2'-O-methyl modified nucleotide
  modified_base 2: mod_base = OTHER; note = 2'-O-methyl modified nucleotide
  modified_base 3: mod_base = OTHER; note = 2'-O-methyl modified nucleotide
  modified_base 4: mod_base = OTHER; note = 2'-O-methyl modified nucleotide
  modified_base 11: mod_base = OTHER; note = 2'-O-methyl modified nucleotide
  modified_base 13: mod_base = OTHER; note = 2'-O-methyl modified nucleotide
  modified_base 23: mod_base = OTHER; note = 2'-O-methyl modified nucleotide
  modified_base 25: mod_base = OTHER; note = 2'-O-methyl modified nucleotide
  modified_base 26: mod_base = OTHER; note = 2'-O-methyl modified nucleotide
  modified_base 27: mod_base = OTHER; note = 2'-O-methyl modified nucleotide
gatagtaaatcactaacaacttctgaa

SEQ ID NO: 1422 - RNA, 27 nt, synthetic construct
  source 1..27: mol_type = other RNA
  modified_base 1: mod_base = OTHER; note = 2'-O-methyl modified nucleotide
  modified_base 2: mod_base = OTHER; note = 2'-O-methyl modified nucleotide
  modified_base 3: mod_base = OTHER; note = 2'-O-methyl modified nucleotide
  modified_base 4: mod_base = OTHER; note = 2'-O-methyl modified nucleotide
  modified_base 11: mod_base = OTHER; note = 2'-O-methyl modified nucleotide
  modified_base 13: mod_base = OTHER; note = 2'-O-methyl modified nucleotide
  modified_base 23: mod_base = OTHER; note = 2'-O-methyl modified nucleotide
  modified_base 25: mod_base = OTHER; note = 2'-O-methyl modified nucleotide
  modified_base 26: mod_base = OTHER; note = 2'-O-methyl modified nucleotide
  modified_base 27: mod_base = OTHER; note = 2'-O-methyl modified nucleotide
tgatatcaaatcactaacaacttctga

SEQ ID NO: 1423 - RNA, 27 nt, synthetic construct
  source 1..27: mol_type = other RNA
  modified_base 1: mod_base = OTHER; note = 2'-O-methyl modified nucleotide
  modified_base 2: mod_base = OTHER; note = 2'-O-methyl modified nucleotide
  modified_base 3: mod_base = OTHER; note = 2'-O-methyl modified nucleotide
  modified_base 4: mod_base = OTHER; note = 2'-O-methyl modified nucleotide
  modified_base 11: mod_base = OTHER; note = 2'-O-methyl modified nucleotide
  modified_base 13: mod_base = OTHER; note = 2'-O-methyl modified nucleotide
  modified_base 23: mod_base = OTHER; note = 2'-O-methyl modified nucleotide
  modified_base 25: mod_base = OTHER; note = 2'-O-methyl modified nucleotide
  modified_base 26: mod_base = OTHER; note = 2'-O-methyl modified nucleotide
  modified_base 27: mod_base = OTHER; note = 2'-O-methyl modified nucleotide
atgattgcaaatcactaacaacttctg

SEQ ID NO: 1424 - RNA, 27 nt, synthetic construct
  source 1..27: mol_type = other RNA
  modified_base 1: mod_base = OTHER; note = 2'-O-methyl modified nucleotide
  modified_base 2: mod_base = OTHER; note = 2'-O-methyl modified nucleotide
  modified_base 3: mod_base = OTHER; note = 2'-O-methyl modified nucleotide
  modified_base 4: mod_base = OTHER; note = 2'-O-methyl modified nucleotide
  modified_base 11: mod_base = OTHER; note = 2'-O-methyl modified nucleotide
  modified_base 13: mod_base = OTHER; note = 2'-O-methyl modified nucleotide
  modified_base 23: mod_base = OTHER; note = 2'-O-methyl modified nucleotide
  modified_base 25: mod_base = OTHER; note = 2'-O-methyl modified nucleotide
  modified_base 26: mod_base = OTHER; note = 2'-O-methyl modified nucleotide
  modified_base 27: mod_base = OTHER; note = 2'-O-methyl modified nucleotide
tatgatagcaaatcactaacaacttct

SEQ ID NO: 1425 - RNA, 27 nt, synthetic construct
  source 1..27: mol_type = other RNA
  modified_base 1: mod_base = OTHER; note = 2'-O-methyl modified nucleotide
  modified_base 2: mod_base = OTHER; note = 2'-O-methyl modified nucleotide
  modified_base 3: mod_base = OTHER; note = 2'-O-methyl modified nucleotide
  modified_base 4: mod_base = OTHER; note = 2'-O-methyl modified nucleotide
  modified_base 11: mod_base = OTHER; note = 2'-O-methyl modified nucleotide
  modified_base 13: mod_base = OTHER; note = 2'-O-methyl modified nucleotide
  modified_base 23: mod_base = OTHER; note = 2'-O-methyl modified nucleotide
  modified_base 25: mod_base = OTHER; note = 2'-O-methyl modified nucleotide
  modified_base 26: mod_base = OTHER; note = 2'-O-methyl modified nucleotide
  modified_base 27: mod_base = OTHER; note = 2'-O-methyl modified nucleotide
atatgttagcaaatcactaacaacttc

SEQ ID NO: 1426 - RNA, 27 nt, synthetic construct
  source 1..27: mol_type = other RNA
  modified_base 1: mod_base = OTHER; note = 2'-O-methyl modified nucleotide
  modified_base 2: mod_base = OTHER; note = 2'-O-methyl modified nucleotide
  modified_base 3: mod_base = OTHER; note = 2'-O-methyl modified nucleotide
  modified_base 4: mod_base = OTHER; note = 2'-O-methyl modified nucleotide
  modified_base 11: mod_base = OTHER; note = 2'-O-methyl modified nucleotide
  modified_base 13: mod_base = OTHER; note = 2'-O-methyl modified nucleotide
  modified_base 23: mod_base = OTHER; note = 2'-O-methyl modified nucleotide
  modified_base 25: mod_base = OTHER; note = 2'-O-methyl modified nucleotide
  modified_base 26: mod_base = OTHER; note = 2'-O-methyl modified nucleotide
  modified_base 27: mod_base = OTHER; note = 2'-O-methyl modified nucleotide
tatattatagcaaatcactaacaactt

SEQ ID NO: 1427 - RNA, 27 nt, synthetic construct
  source 1..27: mol_type = other RNA
  modified_base 1: mod_base = OTHER; note = 2'-O-methyl modified nucleotide
  modified_base 2: mod_base = OTHER; note = 2'-O-methyl modified nucleotide
  modified_base 3: mod_base = OTHER; note = 2'-O-methyl modified nucleotide
  modified_base 4: mod_base = OTHER; note = 2'-O-methyl modified nucleotide
  modified_base 11: mod_base = OTHER; note = 2'-O-methyl modified nucleotide
  modified_base 13: mod_base = OTHER; note = 2'-O-methyl modified nucleotide
  modified_base 23: mod_base = OTHER; note = 2'-O-methyl modified nucleotide
  modified_base 25: mod_base = OTHER; note = 2'-O-methyl modified nucleotide
  modified_base 26: mod_base = OTHER; note = 2'-O-methyl modified nucleotide
  modified_base 27: mod_base = OTHER; note = 2'-O-methyl modified nucleotide
atatatgatagcaaatcactaacaact

SEQ ID NO: 1428 - RNA, 27 nt, synthetic construct
  source 1..27: mol_type = other RNA
  modified_base 1: mod_base = OTHER; note = 2'-O-methyl modified nucleotide
  modified_base 2: mod_base = OTHER; note = 2'-O-methyl modified nucleotide
  modified_base 3: mod_base = OTHER; note = 2'-O-methyl modified nucleotide
  modified_base 4: mod_base = OTHER; note = 2'-O-methyl modified nucleotide
  modified_base 11: mod_base = OTHER; note = 2'-O-methyl modified nucleotide
  modified_base 13: mod_base = OTHER; note = 2'-O-methyl modified nucleotide
  modified_base 23: mod_base = OTHER; note = 2'-O-methyl modified nucleotide
  modified_base 25: mod_base = OTHER; note = 2'-O-methyl modified nucleotide
  modified_base 26: mod_base = OTHER; note = 2'-O-methyl modified nucleotide
  modified_base 27: mod_base = OTHER; note = 2'-O-methyl modified nucleotide
aaaagtcacctaaaaatcttataatat

SEQ ID NO: 1429 - RNA, 27 nt, synthetic construct
  source 1..27: mol_type = other RNA
  modified_base 1: mod_base = OTHER; note = 2'-O-methyl modified nucleotide
  modified_base 2: mod_base = OTHER; note = 2'-O-methyl modified nucleotide
  modified_base 3: mod_base = OTHER; note = 2'-O-methyl modified nucleotide
  modified_base 4: mod_base = OTHER; note = 2'-O-methyl modified nucleotide
  modified_base 11: mod_base = OTHER; note = 2'-O-methyl modified nucleotide
  modified_base 13: mod_base = OTHER; note = 2'-O-methyl modified nucleotide
  modified_base 23: mod_base = OTHER; note = 2'-O-methyl modified nucleotide
  modified_base 25: mod_base = OTHER; note = 2'-O-methyl modified nucleotide
  modified_base 26: mod_base = OTHER; note = 2'-O-methyl modified nucleotide
  modified_base 27: mod_base = OTHER; note = 2'-O-methyl modified nucleotide
taaaatacacctaaaaatcttataata

SEQ ID NO: 1430 - RNA, 27 nt, synthetic construct
  source 1..27: mol_type = other RNA
  modified_base 1: mod_base = OTHER; note = 2'-O-methyl modified nucleotide
  modified_base 2: mod_base = OTHER; note = 2'-O-methyl modified nucleotide
  modified_base 3: mod_base = OTHER; note = 2'-O-methyl modified nucleotide
  modified_base 4: mod_base = OTHER; note = 2'-O-methyl modified nucleotide
  modified_base 11: mod_base = OTHER; note = 2'-O-methyl modified nucleotide
  modified_base 13: mod_base = OTHER; note = 2'-O-methyl modified nucleotide
  modified_base 23: mod_base = OTHER; note = 2'-O-methyl modified nucleotide
  modified_base 25: mod_base = OTHER; note = 2'-O-methyl modified nucleotide
  modified_base 26: mod_base = OTHER; note = 2'-O-methyl modified nucleotide
  modified_base 27: mod_base = OTHER; note = 2'-O-methyl modified nucleotide
ttaaatgacacctaaaaatcttataat

SEQ ID NO: 1431 - RNA, 27 nt, synthetic construct
  source 1..27: mol_type = other RNA
  modified_base 1: mod_base = OTHER; note = 2'-O-methyl modified nucleotide
  modified_base 2: mod_base = OTHER; note = 2'-O-methyl modified nucleotide
  modified_base 3: mod_base = OTHER; note = 2'-O-methyl modified nucleotide
  modified_base 4: mod_base = OTHER; note = 2'-O-methyl modified nucleotide
  modified_base 11: mod_base = OTHER; note = 2'-O-methyl modified nucleotide
  modified_base 13: mod_base = OTHER; note = 2'-O-methyl modified nucleotide
  modified_base 23: mod_base = OTHER; note = 2'-O-methyl modified nucleotide
  modified_base 25: mod_base = OTHER; note = 2'-O-methyl modified nucleotide
  modified_base 26: mod_base = OTHER; note = 2'-O-methyl modified nucleotide
  modified_base 27: mod_base = OTHER; note = 2'-O-methyl modified nucleotide
attaatagacacctaaaaatcttataa

SEQ ID NO: 1432 - RNA, 27 nt, synthetic construct
  source 1..27: mol_type = other RNA
  modified_base 1: mod_base = OTHER; note = 2'-O-methyl modified nucleotide
  modified_base 2: mod_base = OTHER; note = 2'-O-methyl modified nucleotide
  modified_base 3: mod_base = OTHER; note = 2'-O-methyl modified nucleotide
  modified_base 4: mod_base = OTHER; note = 2'-O-methyl modified nucleotide
  modified_base 11: mod_base = OTHER; note = 2'-O-methyl modified nucleotide
  modified_base 13: mod_base = OTHER; note = 2'-O-methyl modified nucleotide
  modified_base 23: mod_base = OTHER; note = 2'-O-methyl modified nucleotide
  modified_base 25: mod_base = OTHER; note = 2'-O-methyl modified nucleotide
  modified_base 26: mod_base = OTHER; note = 2'-O-methyl modified nucleotide
  modified_base 27: mod_base = OTHER; note = 2'-O-methyl modified nucleotide
cattataagacacctaaaaatcttata

SEQ ID NO: 1433 - RNA, 27 nt, synthetic construct
  source 1..27: mol_type = other RNA
  modified_base 1: mod_base = OTHER; note = 2'-O-methyl modified nucleotide
  modified_base 2: mod_base = OTHER; note = 2'-O-methyl modified nucleotide
  modified_base 3: mod_base = OTHER; note = 2'-O-methyl modified nucleotide
  modified_base 4: mod_base = OTHER; note = 2'-O-methyl modified nucleotide
  modified_base 11: mod_base = OTHER; note = 2'-O-methyl modified nucleotide
  modified_base 13: mod_base = OTHER; note = 2'-O-methyl modified nucleotide
  modified_base 23: mod_base = OTHER; note = 2'-O-methyl modified nucleotide
  modified_base 25: mod_base = OTHER; note = 2'-O-methyl modified nucleotide
  modified_base 26: mod_base = OTHER; note = 2'-O-methyl modified nucleotide
  modified_base 27: mod_base = OTHER; note = 2'-O-methyl modified nucleotide
tcatttaaagacacctaaaaatcttat

SEQ ID NO: 1434 - RNA, 27 nt, synthetic construct
  source 1..27: mol_type = other RNA
  modified_base 1: mod_base = OTHER; note = 2'-O-methyl modified nucleotide
  modified_base 2: mod_base = OTHER; note = 2'-O-methyl modified nucleotide
  modified_base 3: mod_base = OTHER; note = 2'-O-methyl modified nucleotide
  modified_base 4: mod_base = OTHER; note = 2'-O-methyl modified nucleotide
  modified_base 11: mod_base = OTHER; note = 2'-O-methyl modified nucleotide
  modified_base 13: mod_base = OTHER; note = 2'-O-methyl modified nucleotide
  modified_base 23: mod_base = OTHER; note = 2'-O-methyl modified nucleotide
  modified_base 25: mod_base = OTHER; note = 2'-O-methyl modified nucleotide
  modified_base 26: mod_base = OTHER; note = 2'-O-methyl modified nucleotide
  modified_base 27: mod_base = OTHER; note = 2'-O-methyl modified nucleotide
atcattaaaagacacctaaaaatctta

SEQ ID NO: 1435 - RNA, 27 nt, synthetic construct
  source 1..27: mol_type = other RNA
  modified_base 1: mod_base = OTHER; note = 2'-O-methyl modified nucleotide
  modified_base 2: mod_base = OTHER; note = 2'-O-methyl modified nucleotide
  modified_base 3: mod_base = OTHER; note = 2'-O-methyl modified nucleotide
  modified_base 4: mod_base = OTHER; note = 2'-O-methyl modified nucleotide
  modified_base 11: mod_base = OTHER; note = 2'-O-methyl modified nucleotide
  modified_base 13: mod_base = OTHER; note = 2'-O-methyl modified nucleotide
  modified_base 23: mod_base = OTHER; note = 2'-O-methyl modified nucleotide
  modified_base 25: mod_base = OTHER; note = 2'-O-methyl modified nucleotide
  modified_base 26: mod_base = OTHER; note = 2'-O-methyl modified nucleotide
  modified_base 27: mod_base = OTHER; note = 2'-O-methyl modified nucleotide
tatcattaaaagacacctaaaaatctt

SEQ ID NO: 1436 - RNA, 27 nt, synthetic construct
  source 1..27: mol_type = other RNA
  modified_base 1: mod_base = OTHER; note = 2'-O-methyl modified nucleotide
  modified_base 2: mod_base = OTHER; note = 2'-O-methyl modified nucleotide
  modified_base 3: mod_base = OTHER; note = 2'-O-methyl modified nucleotide
  modified_base 4: mod_base = OTHER; note = 2'-O-methyl modified nucleotide
  modified_base 11: mod_base = OTHER; note = 2'-O-methyl modified nucleotide
  modified_base 13: mod_base = OTHER; note = 2'-O-methyl modified nucleotide
  modified_base 23: mod_base = OTHER; note = 2'-O-methyl modified nucleotide
  modified_base 25: mod_base = OTHER; note = 2'-O-methyl modified nucleotide
  modified_base 26: mod_base = OTHER; note = 2'-O-methyl modified nucleotide
  modified_base 27: mod_base = OTHER; note = 2'-O-methyl modified nucleotide
gtatctttaaaagacacctaaaaatct

SEQ ID NO: 1437 - RNA, 27 nt, synthetic construct
  source 1..27: mol_type = other RNA
  modified_base 1: mod_base = OTHER; note = 2'-O-methyl modified nucleotide
  modified_base 2: mod_base = OTHER; note = 2'-O-methyl modified nucleotide
  modified_base 3: mod_base = OTHER; note = 2'-O-methyl modified nucleotide
  modified_base 4: mod_base = OTHER; note = 2'-O-methyl modified nucleotide
  modified_base 11: mod_base = OTHER; note = 2'-O-methyl modified nucleotide
  modified_base 13: mod_base = OTHER; note = 2'-O-methyl modified nucleotide
  modified_base 23: mod_base = OTHER; note = 2'-O-methyl modified nucleotide
  modified_base 25: mod_base = OTHER; note = 2'-O-methyl modified nucleotide
  modified_base 26: mod_base = OTHER; note = 2'-O-methyl modified nucleotide
  modified_base 27: mod_base = OTHER; note = 2'-O-methyl modified nucleotide
agtattattaaaagacacctaaaaatc

SEQ ID NO: 1438 - RNA, 27 nt, synthetic construct
  source 1..27: mol_type = other RNA
  modified_base 1: mod_base = OTHER; note = 2'-O-methyl modified nucleotide
  modified_base 2: mod_base = OTHER; note = 2'-O-methyl modified nucleotide
  modified_base 3: mod_base = OTHER; note = 2'-O-methyl modified nucleotide
  modified_base 4: mod_base = OTHER; note = 2'-O-methyl modified nucleotide
  modified_base 11: mod_base = OTHER; note = 2'-O-methyl modified nucleotide
  modified_base 13: mod_base = OTHER; note = 2'-O-methyl modified nucleotide
  modified_base 23: mod_base = OTHER; note = 2'-O-methyl modified nucleotide
  modified_base 25: mod_base = OTHER; note = 2'-O-methyl modified nucleotide
  modified_base 26: mod_base = OTHER; note = 2'-O-methyl modified nucleotide
  modified_base 27: mod_base = OTHER; note = 2'-O-methyl modified nucleotide
cagtatcattaaaagacacctaaaaat

SEQ ID NO: 1439 - RNA, 27 nt, synthetic construct
  source 1..27: mol_type = other RNA
  modified_base 1: mod_base = OTHER; note = 2'-O-methyl modified nucleotide
  modified_base 2: mod_base = OTHER; note = 2'-O-methyl modified nucleotide
  modified_base 3: mod_base = OTHER; note = 2'-O-methyl modified nucleotide
  modified_base 4: mod_base = OTHER; note = 2'-O-methyl modified nucleotide
  modified_base 11: mod_base = OTHER; note = 2'-O-methyl modified nucleotide
  modified_base 13: mod_base = OTHER; note = 2'-O-methyl modified nucleotide
  modified_base 23: mod_base = OTHER; note = 2'-O-methyl modified nucleotide
  modified_base 25: mod_base = OTHER; note = 2'-O-methyl modified nucleotide
  modified_base 26: mod_base = OTHER; note = 2'-O-methyl modified nucleotide
  modified_base 27: mod_base = OTHER; note = 2'-O-methyl modified nucleotide
acagtttcattaaaagacacctaaaaa

SEQ ID NO: 1440 - RNA, 27 nt, synthetic construct
  source 1..27: mol_type = other RNA
  modified_base 1: mod_base = OTHER; note = 2'-O-methyl modified nucleotide
  modified_base 2: mod_base = OTHER; note = 2'-O-methyl modified nucleotide
  modified_base 3: mod_base = OTHER; note = 2'-O-methyl modified nucleotide
  modified_base 4: mod_base = OTHER; note = 2'-O-methyl modified nucleotide
  modified_base 11: mod_base = OTHER; note = 2'-O-methyl modified nucleotide
  modified_base 13: mod_base = OTHER; note = 2'-O-methyl modified nucleotide
  modified_base 23: mod_base = OTHER; note = 2'-O-methyl modified nucleotide
  modified_base 25: mod_base = OTHER; note = 2'-O-methyl modified nucleotide
  modified_base 26: mod_base = OTHER; note = 2'-O-methyl modified nucleotide
  modified_base 27: mod_base = OTHER; note = 2'-O-methyl modified nucleotide
gacagtatcattaaaagacacctaaaa

SEQ ID NO: 1441 - RNA, 27 nt, synthetic construct
  source 1..27: mol_type = other RNA
  modified_base 1: mod_base = OTHER; note = 2'-O-methyl modified nucleotide
  modified_base 2: mod_base = OTHER; note = 2'-O-methyl modified nucleotide
  modified_base 3: mod_base = OTHER; note = 2'-O-methyl modified nucleotide
  modified_base 4: mod_base = OTHER; note = 2'-O-methyl modified nucleotide
  modified_base 11: mod_base = OTHER; note = 2'-O-methyl modified nucleotide
  modified_base 13: mod_base = OTHER; note = 2'-O-methyl modified nucleotide
  modified_base 23: mod_base = OTHER; note = 2'-O-methyl modified nucleotide
  modified_base 25: mod_base = OTHER; note = 2'-O-methyl modified nucleotide
  modified_base 26: mod_base = OTHER; note = 2'-O-methyl modified nucleotide
  modified_base 27: mod_base = OTHER; note = 2'-O-methyl modified nucleotide
agacattatcattaaaagacacctaaa

SEQ ID NO: 1442 - RNA, 27 nt, synthetic construct
  source 1..27: mol_type = other RNA
  modified_base 1: mod_base = OTHER; note = 2'-O-methyl modified nucleotide
  modified_base 2: mod_base = OTHER; note = 2'-O-methyl modified nucleotide
  modified_base 3: mod_base = OTHER; note = 2'-O-methyl modified nucleotide
  modified_base 4: mod_base = OTHER; note = 2'-O-methyl modified nucleotide
  modified_base 11: mod_base = OTHER; note = 2'-O-methyl modified nucleotide
  modified_base 13: mod_base = OTHER; note = 2'-O-methyl modified nucleotide
  modified_base 23: mod_base = OTHER; note = 2'-O-methyl modified nucleotide
  modified_base 25: mod_base = OTHER; note = 2'-O-methyl modified nucleotide
  modified_base 26: mod_base = OTHER; note = 2'-O-methyl modified nucleotide
  modified_base 27: mod_base = OTHER; note = 2'-O-methyl modified nucleotide
tagactgtatcattaaaagacacctaa

SEQ ID NO: 1443 - RNA, 27 nt, synthetic construct
  source 1..27: mol_type = other RNA
  modified_base 1: mod_base = OTHER; note = 2'-O-methyl modified nucleotide
  modified_base 2: mod_base = OTHER; note = 2'-O-methyl modified nucleotide
  modified_base 3: mod_base = OTHER; note = 2'-O-methyl modified nucleotide
  modified_base 4: mod_base = OTHER; note = 2'-O-methyl modified nucleotide
  modified_base 11: mod_base = OTHER; note = 2'-O-methyl modified nucleotide
  modified_base 13: mod_base = OTHER; note = 2'-O-methyl modified nucleotide
  modified_base 23: mod_base = OTHER; note = 2'-O-methyl modified nucleotide
  modified_base 25: mod_base = OTHER; note = 2'-O-methyl modified nucleotide
  modified_base 26: mod_base = OTHER; note = 2'-O-methyl modified nucleotide
  modified_base 27: mod_base = OTHER; note = 2'-O-methyl modified nucleotide
ttagatagtatcattaaaagacaccta

SEQ ID NO: 1444 - RNA, 27 nt, synthetic construct
  source 1..27: mol_type = other RNA
  modified_base 1: mod_base = OTHER; note = 2'-O-methyl modified nucleotide
  modified_base 2: mod_base = OTHER; note = 2'-O-methyl modified nucleotide
  modified_base 3: mod_base = OTHER; note = 2'-O-methyl modified nucleotide
  modified_base 4: mod_base = OTHER; note = 2'-O-methyl modified nucleotide
  modified_base 11: mod_base = OTHER; note = 2'-O-methyl modified nucleotide
  modified_base 13: mod_base = OTHER; note = 2'-O-methyl modified nucleotide
  modified_base 23: mod_base = OTHER; note = 2'-O-methyl modified nucleotide
  modified_base 25: mod_base = OTHER; note = 2'-O-methyl modified nucleotide
  modified_base 26: mod_base = OTHER; note = 2'-O-methyl modified nucleotide
  modified_base 27: mod_base = OTHER; note = 2'-O-methyl modified nucleotide
cttagtcagtatcattaaaagacacct

SEQ ID NO: 1445 - RNA, 27 nt, synthetic construct
  source 1..27: mol_type = other RNA
  modified_base 1: mod_base = OTHER; note = 2'-O-methyl modified nucleotide
  modified_base 2: mod_base = OTHER; note = 2'-O-methyl modified nucleotide
  modified_base 3: mod_base = OTHER; note = 2'-O-methyl modified nucleotide
  modified_base 4: mod_base = OTHER; note = 2'-O-methyl modified nucleotide
  modified_base 11: mod_base = OTHER; note = 2'-O-methyl modified nucleotide
  modified_base 13: mod_base = OTHER; note = 2'-O-methyl modified nucleotide
  modified_base 23: mod_base = OTHER; note = 2'-O-methyl modified nucleotide
  modified_base 25: mod_base = OTHER; note = 2'-O-methyl modified nucleotide
  modified_base 26: mod_base = OTHER; note = 2'-O-methyl modified nucleotide
  modified_base 27: mod_base = OTHER; note = 2'-O-methyl modified nucleotide
tcttatacagtatcattaaaagacacc

SEQ ID NO: 1446 - RNA, 27 nt, synthetic construct
  source 1..27: mol_type = other RNA
  modified_base 1: mod_base = OTHER; note = 2'-O-methyl modified nucleotide
  modified_base 2: mod_base = OTHER; note = 2'-O-methyl modified nucleotide
  modified_base 3: mod_base = OTHER; note = 2'-O-methyl modified nucleotide
  modified_base 4: mod_base = OTHER; note = 2'-O-methyl modified nucleotide
  modified_base 11: mod_base = OTHER; note = 2'-O-methyl modified nucleotide
  modified_base 13: mod_base = OTHER; note = 2'-O-methyl modified nucleotide
  modified_base 23: mod_base = OTHER; note = 2'-O-methyl modified nucleotide
  modified_base 25: mod_base = OTHER; note = 2'-O-methyl modified nucleotide
  modified_base 26: mod_base = OTHER; note = 2'-O-methyl modified nucleotide
  modified_base 27: mod_base = OTHER; note = 2'-O-methyl modified nucleotide
ttctttgacagtatcattaaaagacac

SEQ ID NO: 1447 - RNA, 27 nt, synthetic construct
  source 1..27: mol_type = other RNA
  modified_base 1: mod_base = OTHER; note = 2'-O-methyl modified nucleotide
  modified_base 2: mod_base = OTHER; note = 2'-O-methyl modified nucleotide
  modified_base 3: mod_base = OTHER; note = 2'-O-methyl modified nucleotide
  modified_base 4: mod_base = OTHER; note = 2'-O-methyl modified nucleotide
  modified_base 11: mod_base = OTHER; note = 2'-O-methyl modified nucleotide
  modified_base 13: mod_base = OTHER; note = 2'-O-methyl modified nucleotide
  modified_base 23: mod_base = OTHER; note = 2'-O-methyl modified nucleotide
  modified_base 25: mod_base = OTHER; note = 2'-O-methyl modified nucleotide
  modified_base 26: mod_base = OTHER; note = 2'-O-methyl modified nucleotide
  modified_base 27: mod_base = OTHER; note = 2'-O-methyl modified nucleotide
attcttagacagtatcattaaaagaca

SEQ ID NO: 1448 - RNA, 27 nt, synthetic construct
  source 1..27: mol_type = other RNA
  modified_base 1: mod_base = OTHER; note = 2'-O-methyl modified nucleotide
  modified_base 2: mod_base = OTHER; note = 2'-O-methyl modified nucleotide
  modified_base 3: mod_base = OTHER; note = 2'-O-methyl modified nucleotide
  modified_base 4: mod_base = OTHER; note = 2'-O-methyl modified nucleotide
  modified_base 11: mod_base = OTHER; note = 2'-O-methyl modified nucleotide
  modified_base 13: mod_base = OTHER; note = 2'-O-methyl modified nucleotide
  modified_base 23: mod_base = OTHER; note = 2'-O-methyl modified nucleotide
  modified_base 25: mod_base = OTHER; note = 2'-O-methyl modified nucleotide
  modified_base 26: mod_base = OTHER; note = 2'-O-methyl modified nucleotide
  modified_base 27: mod_base = OTHER; note = 2'-O-methyl modified nucleotide
tattcttagacagtatcattaaaagac

SEQ ID NO: 1449 - RNA, 27 nt, synthetic construct
  source 1..27: mol_type = other RNA
  modified_base 1: mod_base = OTHER; note = 2'-O-methyl modified nucleotide
  modified_base 2: mod_base = OTHER; note = 2'-O-methyl modified nucleotide
  modified_base 3: mod_base = OTHER; note = 2'-O-methyl modified nucleotide
  modified_base 4: mod_base = OTHER; note = 2'-O-methyl modified nucleotide
  modified_base 11: mod_base = OTHER; note = 2'-O-methyl modified nucleotide
  modified_base 13: mod_base = OTHER; note = 2'-O-methyl modified nucleotide
  modified_base 23: mod_base = OTHER; note = 2'-O-methyl modified nucleotide
  modified_base 25: mod_base = OTHER; note = 2'-O-methyl modified nucleotide
  modified_base 26: mod_base = OTHER; note = 2'-O-methyl modified nucleotide
  modified_base 27: mod_base = OTHER; note = 2'-O-methyl modified nucleotide
ttatttttagacagtatcattaaaaga

SEQ ID NO: 1450 - RNA, 27 nt, synthetic construct
  source 1..27: mol_type = other RNA
  modified_base 1: mod_base = OTHER; note = 2'-O-methyl modified nucleotide
  modified_base 2: mod_base = OTHER; note = 2'-O-methyl modified nucleotide
  modified_base 3: mod_base = OTHER; note = 2'-O-methyl modified nucleotide
  modified_base 4: mod_base = OTHER; note = 2'-O-methyl modified nucleotide
  modified_base 11: mod_base = OTHER; note = 2'-O-methyl modified nucleotide
  modified_base 13: mod_base = OTHER; note = 2'-O-methyl modified nucleotide
  modified_base 23: mod_base = OTHER; note = 2'-O-methyl modified nucleotide
  modified_base 25: mod_base = OTHER; note = 2'-O-methyl modified nucleotide
  modified_base 26: mod_base = OTHER; note = 2'-O-methyl modified nucleotide
  modified_base 27: mod_base = OTHER; note = 2'-O-methyl modified nucleotide
attattcttagacagtatcattaaaag

SEQ ID NO: 1451 - RNA, 27 nt, synthetic construct
  source 1..27: mol_type = other RNA
  modified_base 1: mod_base = OTHER; note = 2'-O-methyl modified nucleotide
  modified_base 2: mod_base = OTHER; note = 2'-O-methyl modified nucleotide
  modified_base 3: mod_base = OTHER; note = 2'-O-methyl modified nucleotide
  modified_base 4: mod_base = OTHER; note = 2'-O-methyl modified nucleotide
  modified_base 11: mod_base = OTHER; note = 2'-O-methyl modified nucleotide
  modified_base 13: mod_base = OTHER; note = 2'-O-methyl modified nucleotide
  modified_base 23: mod_base = OTHER; note = 2'-O-methyl modified nucleotide
  modified_base 25: mod_base = OTHER; note = 2'-O-methyl modified nucleotide
  modified_base 26: mod_base = OTHER; note = 2'-O-methyl modified nucleotide
  modified_base 27: mod_base = OTHER; note = 2'-O-methyl modified nucleotide
cattattcttagacagtatcattaaaa

SEQ ID NO: 1452 - RNA, 27 nt, synthetic construct
  source 1..27: mol_type = other RNA
  modified_base 1: mod_base = OTHER; note = 2'-O-methyl modified nucleotide
  modified_base 2: mod_base = OTHER; note = 2'-O-methyl modified nucleotide
  modified_base 3: mod_base = OTHER; note = 2'-O-methyl modified nucleotide
  modified_base 4: mod_base = OTHER; note = 2'-O-methyl modified nucleotide
  modified_base 11: mod_base = OTHER; note = 2'-O-methyl modified nucleotide
  modified_base 13: mod_base = OTHER; note = 2'-O-methyl modified nucleotide
  modified_base 23: mod_base = OTHER; note = 2'-O-methyl modified nucleotide
  modified_base 25: mod_base = OTHER; note = 2'-O-methyl modified nucleotide
  modified_base 26: mod_base = OTHER; note = 2'-O-methyl modified nucleotide
  modified_base 27: mod_base = OTHER; note = 2'-O-methyl modified nucleotide
tcatttttcttagacagtatcattaaa

SEQ ID NO: 1453 - RNA, 27 nt, synthetic construct
  source 1..27: mol_type = other RNA
  modified_base 1: mod_base = OTHER; note = 2'-O-methyl modified nucleotide
  modified_base 2: mod_base = OTHER; note = 2'-O-methyl modified nucleotide
  modified_base 3: mod_base = OTHER; note = 2'-O-methyl modified nucleotide
  modified_base 4: mod_base = OTHER; note = 2'-O-methyl modified nucleotide
  modified_base 11: mod_base = OTHER; note = 2'-O-methyl modified nucleotide
  modified_base 13: mod_base = OTHER; note = 2'-O-methyl modified nucleotide
  modified_base 23: mod_base = OTHER; note = 2'-O-methyl modified nucleotide
  modified_base 25: mod_base = OTHER; note = 2'-O-methyl modified nucleotide
  modified_base 26: mod_base = OTHER; note = 2'-O-methyl modified nucleotide
  modified_base 27: mod_base = OTHER; note = 2'-O-methyl modified nucleotide
gtcattattcttagacagtatcattaa

SEQ ID NO: 1454 - RNA, 27 nt, synthetic construct
  source 1..27: mol_type = other RNA
  modified_base 1: mod_base = OTHER; note = 2'-O-methyl modified nucleotide
  modified_base 2: mod_base = OTHER; note = 2'-O-methyl modified nucleotide
  modified_base 3: mod_base = OTHER; note = 2'-O-methyl modified nucleotide
  modified_base 4: mod_base = OTHER; note = 2'-O-methyl modified nucleotide
  modified_base 11: mod_base = OTHER; note = 2'-O-methyl modified nucleotide
  modified_base 13: mod_base = OTHER; note = 2'-O-methyl modified nucleotide
  modified_base 23: mod_base = OTHER; note = 2'-O-methyl modified nucleotide
  modified_base 25: mod_base = OTHER; note = 2'-O-methyl modified nucleotide
  modified_base 26: mod_base = OTHER; note = 2'-O-methyl modified nucleotide
  modified_base 27: mod_base = OTHER; note = 2'-O-methyl modified nucleotide
cgtcattattcttagacagtatcatta

SEQ ID NO: 1455 - RNA, 27 nt, synthetic construct
  source 1..27: mol_type = other RNA
  modified_base 1: mod_base = OTHER; note = 2'-O-methyl modified nucleotide
  modified_base 2: mod_base = OTHER; note = 2'-O-methyl modified nucleotide
  modified_base 3: mod_base = OTHER; note = 2'-O-methyl modified nucleotide
  modified_base 4: mod_base = OTHER; note = 2'-O-methyl modified nucleotide
  modified_base 11: mod_base = OTHER; note = 2'-O-methyl modified nucleotide
  modified_base 13: mod_base = OTHER; note = 2'-O-methyl modified nucleotide
  modified_base 23: mod_base = OTHER; note = 2'-O-methyl modified nucleotide
  modified_base 25: mod_base = OTHER; note = 2'-O-methyl modified nucleotide
  modified_base 26: mod_base = OTHER; note = 2'-O-methyl modified nucleotide
  modified_base 27: mod_base = OTHER; note = 2'-O-methyl modified nucleotide
acgtctttattcttagacagtatcatt

SEQ ID NO: 1456 - RNA, 27 nt, synthetic construct
  source 1..27: mol_type = other RNA
  modified_base 1: mod_base = OTHER; note = 2'-O-methyl modified nucleotide
  modified_base 2: mod_base = OTHER; note = 2'-O-methyl modified nucleotide
  modified_base 3: mod_base = OTHER; note = 2'-O-methyl modified nucleotide
  modified_base 4: mod_base = OTHER; note = 2'-O-methyl modified nucleotide
  modified_base 11: mod_base = OTHER; note = 2'-O-methyl modified nucleotide
  modified_base 13: mod_base = OTHER; note = 2'-O-methyl modified nucleotide
  modified_base 23: mod_base = OTHER; note = 2'-O-methyl modified nucleotide
  modified_base 25: mod_base = OTHER; note = 2'-O-methyl modified nucleotide
  modified_base 26: mod_base = OTHER; note = 2'-O-methyl modified nucleotide
  modified_base 27: mod_base = OTHER; note = 2'-O-methyl modified nucleotide
tacgttattattcttagacagtatcat

SEQ ID NO: 1457 - RNA, 27 nt, synthetic construct
  source 1..27: mol_type = other RNA
  modified_base 1: mod_base = OTHER; note = 2'-O-methyl modified nucleotide
  modified_base 2: mod_base = OTHER; note = 2'-O-methyl modified nucleotide
  modified_base 3: mod_base = OTHER; note = 2'-O-methyl modified nucleotide
  modified_base 4: mod_base = OTHER; note = 2'-O-methyl modified nucleotide
  modified_base 11: mod_base = OTHER; note = 2'-O-methyl modified nucleotide
  modified_base 13: mod_base = OTHER; note = 2'-O-methyl modified nucleotide
  modified_base 23: mod_base = OTHER; note = 2'-O-methyl modified nucleotide
  modified_base 25: mod_base = OTHER; note = 2'-O-methyl modified nucleotide
  modified_base 26: mod_base = OTHER; note = 2'-O-methyl modified nucleotide
  modified_base 27: mod_base = OTHER; note = 2'-O-methyl modified nucleotide
atacgtcattattcttagacagtatca

SEQ ID NO: 1458 - RNA, 27 nt, synthetic construct
  source 1..27: mol_type = other RNA
  modified_base 1: mod_base = OTHER; note = 2'-O-methyl modified nucleotide
  modified_base 2: mod_base = OTHER; note = 2'-O-methyl modified nucleotide
  modified_base 3: mod_base = OTHER; note = 2'-O-methyl modified nucleotide
  modified_base 4: mod_base = OTHER; note = 2'-O-methyl modified nucleotide
  modified_base 11: mod_base = OTHER; note = 2'-O-methyl modified nucleotide
  modified_base 13: mod_base = OTHER; note = 2'-O-methyl modified nucleotide
  modified_base 23: mod_base = OTHER; note = 2'-O-methyl modified nucleotide
  modified_base 25: mod_base = OTHER; note = 2'-O-methyl modified nucleotide
  modified_base 26: mod_base = OTHER; note = 2'-O-methyl modified nucleotide
  modified_base 27: mod_base = OTHER; note = 2'-O-methyl modified nucleotide
aatacttcattattcttagacagtatc

SEQ ID NO: 1459 - RNA, 27 nt, synthetic construct
  source 1..27: mol_type = other RNA
  modified_base 1: mod_base = OTHER; note = 2'-O-methyl modified nucleotide
  modified_base 2: mod_base = OTHER; note = 2'-O-methyl modified nucleotide
  modified_base 3: mod_base = OTHER; note = 2'-O-methyl modified nucleotide
  modified_base 4: mod_base = OTHER; note = 2'-O-methyl modified nucleotide
  modified_base 11: mod_base = OTHER; note = 2'-O-methyl modified nucleotide
  modified_base 13: mod_base = OTHER; note = 2'-O-methyl modified nucleotide
  modified_base 23: mod_base = OTHER; note = 2'-O-methyl modified nucleotide
  modified_base 25: mod_base = OTHER; note = 2'-O-methyl modified nucleotide
  modified_base 26: mod_base = OTHER; note = 2'-O-methyl modified nucleotide
  modified_base 27: mod_base = OTHER; note = 2'-O-methyl modified nucleotide
tatattttaacaaatttcacaatacgt

SEQ ID NO: 1460 - RNA, 27 nt, synthetic construct
  source 1..27: mol_type = other RNA
  modified_base 1: mod_base = OTHER; note = 2'-O-methyl modified nucleotide
  modified_base 2: mod_base = OTHER; note = 2'-O-methyl modified nucleotide
  modified_base 3: mod_base = OTHER; note = 2'-O-methyl modified nucleotide
  modified_base 4: mod_base = OTHER; note = 2'-O-methyl modified nucleotide
  modified_base 11: mod_base = OTHER; note = 2'-O-methyl modified nucleotide
  modified_base 13: mod_base = OTHER; note = 2'-O-methyl modified nucleotide
  modified_base 23: mod_base = OTHER; note = 2'-O-methyl modified nucleotide
  modified_base 25: mod_base = OTHER; note = 2'-O-methyl modified nucleotide
  modified_base 26: mod_base = OTHER; note = 2'-O-methyl modified nucleotide
  modified_base 27: mod_base = OTHER; note = 2'-O-methyl modified nucleotide
atatatattaacaaatttcacaatacg

SEQ ID NO: 1461 - RNA, 27 nt, synthetic construct
  source 1..27: mol_type = other RNA
  modified_base 1: mod_base = OTHER; note = 2'-O-methyl modified nucleotide
  modified_base 2: mod_base = OTHER; note = 2'-O-methyl modified nucleotide
  modified_base 3: mod_base = OTHER; note = 2'-O-methyl modified nucleotide
  modified_base 4: mod_base = OTHER; note = 2'-O-methyl modified nucleotide
  modified_base 11: mod_base = OTHER; note = 2'-O-methyl modified nucleotide
  modified_base 13: mod_base = OTHER; note = 2'-O-methyl modified nucleotide
  modified_base 23: mod_base = OTHER; note = 2'-O-methyl modified nucleotide
  modified_base 25: mod_base = OTHER; note = 2'-O-methyl modified nucleotide
  modified_base 26: mod_base = OTHER; note = 2'-O-methyl modified nucleotide
  modified_base 27: mod_base = OTHER; note = 2'-O-methyl modified nucleotide
tatatttattaacaaatttcacaatac

SEQ ID NO: 1462 - RNA, 27 nt, synthetic construct
  source 1..27: mol_type = other RNA
  modified_base 1: mod_base = OTHER; note = 2'-O-methyl modified nucleotide
  modified_base 2: mod_base = OTHER; note = 2'-O-methyl modified nucleotide
  modified_base 3: mod_base = OTHER; note = 2'-O-methyl modified nucleotide
  modified_base 4: mod_base = OTHER; note = 2'-O-methyl modified nucleotide
  modified_base 11: mod_base = OTHER; note = 2'-O-methyl modified nucleotide
  modified_base 13: mod_base = OTHER; note = 2'-O-methyl modified nucleotide
  modified_base 23: mod_base = OTHER; note = 2'-O-methyl modified nucleotide
  modified_base 25: mod_base = OTHER; note = 2'-O-methyl modified nucleotide
  modified_base 26: mod_base = OTHER; note = 2'-O-methyl modified nucleotide
  modified_base 27: mod_base = OTHER; note = 2'-O-methyl modified nucleotide
aagtattatatatattaacaaatttca

SEQ ID NO: 1463 - RNA, 27 nt, synthetic construct
  source 1..27: mol_type = other RNA
  modified_base 1: mod_base = OTHER; note = 2'-O-methyl modified nucleotide
  modified_base 2: mod_base = OTHER; note = 2'-O-methyl modified nucleotide
  modified_base 3: mod_base = OTHER; note = 2'-O-methyl modified nucleotide
  modified_base 4: mod_base = OTHER; note = 2'-O-methyl modified nucleotide
  modified_base 11: mod_base = OTHER; note = 2'-O-methyl modified nucleotide
  modified_base 13: mod_base = OTHER; note = 2'-O-methyl modified nucleotide
  modified_base 23: mod_base = OTHER; note = 2'-O-methyl modified nucleotide
  modified_base 25: mod_base = OTHER; note = 2'-O-methyl modified nucleotide
  modified_base 26: mod_base = OTHER; note = 2'-O-methyl modified nucleotide
  modified_base 27: mod_base = OTHER; note = 2'-O-methyl modified nucleotide
taagttttatatatattaacaaatttc

SEQ ID NO: 1464 - RNA, 27 nt, synthetic construct
  source 1..27: mol_type = other RNA
  modified_base 1: mod_base = OTHER; note = 2'-O-methyl modified nucleotide
  modified_base 2: mod_base = OTHER; note = 2'-O-methyl modified nucleotide
  modified_base 3: mod_base = OTHER; note = 2'-O-methyl modified nucleotide
  modified_base 4: mod_base = OTHER; note = 2'-O-methyl modified nucleotide
  modified_base 11: mod_base = OTHER; note = 2'-O-methyl modified nucleotide
  modified_base 13: mod_base = OTHER; note = 2'-O-methyl modified nucleotide
  modified_base 23: mod_base = OTHER; note = 2'-O-methyl modified nucleotide
  modified_base 25: mod_base = OTHER; note = 2'-O-methyl modified nucleotide
  modified_base 26: mod_base = OTHER; note = 2'-O-methyl modified nucleotide
  modified_base 27: mod_base = OTHER; note = 2'-O-methyl modified nucleotide
ttaagtattatatatattaacaaattt

SEQ ID NO: 1465 - RNA, 27 nt, synthetic construct
  source 1..27: mol_type = other RNA
  modified_base 1: mod_base = OTHER; note = 2'-O-methyl modified nucleotide
  modified_base 2: mod_base = OTHER; note = 2'-O-methyl modified nucleotide
  modified_base 3: mod_base = OTHER; note = 2'-O-methyl modified nucleotide
  modified_base 4: mod_base = OTHER; note = 2'-O-methyl modified nucleotide
  modified_base 11: mod_base = OTHER; note = 2'-O-methyl modified nucleotide
  modified_base 13: mod_base = OTHER; note = 2'-O-methyl modified nucleotide
  modified_base 23: mod_base = OTHER; note = 2'-O-methyl modified nucleotide
  modified_base 25: mod_base = OTHER; note = 2'-O-methyl modified nucleotide
  modified_base 26: mod_base = OTHER; note = 2'-O-methyl modified nucleotide
  modified_base 27: mod_base = OTHER; note = 2'-O-methyl modified nucleotide
tttaattattatatatattaacaaatt

SEQ ID NO: 1466 - RNA, 27 nt, synthetic construct
  source 1..27: mol_type = other RNA
  modified_base 1: mod_base = OTHER; note = 2'-O-methyl modified nucleotide
  modified_base 2: mod_base = OTHER; note = 2'-O-methyl modified nucleotide
  modified_base 3: mod_base = OTHER; note = 2'-O-methyl modified nucleotide
  modified_base 4: mod_base = OTHER; note = 2'-O-methyl modified nucleotide
  modified_base 11: mod_base = OTHER; note = 2'-O-methyl modified nucleotide
  modified_base 13: mod_base = OTHER; note = 2'-O-methyl modified nucleotide
  modified_base 23: mod_base = OTHER; note = 2'-O-methyl modified nucleotide
  modified_base 25: mod_base = OTHER; note = 2'-O-methyl modified nucleotide
  modified_base 26: mod_base = OTHER; note = 2'-O-methyl modified nucleotide
  modified_base 27: mod_base = OTHER; note = 2'-O-methyl modified nucleotide
ttttatgtattatatatattaacaaat

SEQ ID NO: 1467 - RNA, 27 nt, synthetic construct
  source 1..27: mol_type = other RNA
  modified_base 1: mod_base = OTHER; note = 2'-O-methyl modified nucleotide
  modified_base 2: mod_base = OTHER; note = 2'-O-methyl modified nucleotide
  modified_base 3: mod_base = OTHER; note = 2'-O-methyl modified nucleotide
  modified_base 4: mod_base = OTHER; note = 2'-O-methyl modified nucleotide
  modified_base 11: mod_base = OTHER; note = 2'-O-methyl modified nucleotide
  modified_base 13: mod_base = OTHER; note = 2'-O-methyl modified nucleotide
  modified_base 23: mod_base = OTHER; note = 2'-O-methyl modified nucleotide
  modified_base 25: mod_base = OTHER; note = 2'-O-methyl modified nucleotide
  modified_base 26: mod_base = OTHER; note = 2'-O-methyl modified nucleotide
  modified_base 27: mod_base = OTHER; note = 2'-O-methyl modified nucleotide
ttttttagtattatatatattaacaaa

SEQ ID NO: 1468 - RNA, 27 nt, synthetic construct
  source 1..27: mol_type = other RNA
  modified_base 1: mod_base = OTHER; note = 2'-O-methyl modified nucleotide
  modified_base 2: mod_base = OTHER; note = 2'-O-methyl modified nucleotide
  modified_base 3: mod_base = OTHER; note = 2'-O-methyl modified nucleotide
  modified_base 4: mod_base = OTHER; note = 2'-O-methyl modified nucleotide
  modified_base 11: mod_base = OTHER; note = 2'-O-methyl modified nucleotide
  modified_base 13: mod_base = OTHER; note = 2'-O-methyl modified nucleotide
  modified_base 23: mod_base = OTHER; note = 2'-O-methyl modified nucleotide
  modified_base 25: mod_base = OTHER; note = 2'-O-methyl modified nucleotide
  modified_base 26: mod_base = OTHER; note = 2'-O-methyl modified nucleotide
  modified_base 27: mod_base = OTHER; note = 2'-O-methyl modified nucleotide
atttttaagtattatatatattaacaa

SEQ ID NO: 1469 - RNA, 27 nt, synthetic construct
  source 1..27: mol_type = other RNA
  modified_base 1: mod_base = OTHER; note = 2'-O-methyl modified nucleotide
  modified_base 2: mod_base = OTHER; note = 2'-O-methyl modified nucleotide
  modified_base 3: mod_base = OTHER; note = 2'-O-methyl modified nucleotide
  modified_base 4: mod_base = OTHER; note = 2'-O-methyl modified nucleotide
  modified_base 11: mod_base = OTHER; note = 2'-O-methyl modified nucleotide
  modified_base 13: mod_base = OTHER; note = 2'-O-methyl modified nucleotide
  modified_base 23: mod_base = OTHER; note = 2'-O-methyl modified nucleotide
  modified_base 25: mod_base = OTHER; note = 2'-O-methyl modified nucleotide
  modified_base 26: mod_base = OTHER; note = 2'-O-methyl modified nucleotide
  modified_base 27: mod_base = OTHER; note = 2'-O-methyl modified nucleotide
tatttttaagtattatatatattaaca

SEQ ID NO: 1470 - RNA, 27 nt, synthetic construct
  source 1..27: mol_type = other RNA
  modified_base 1: mod_base = OTHER; note = 2'-O-methyl modified nucleotide
  modified_base 2: mod_base = OTHER; note = 2'-O-methyl modified nucleotide
  modified_base 3: mod_base = OTHER; note = 2'-O-methyl modified nucleotide
  modified_base 4: mod_base = OTHER; note = 2'-O-methyl modified nucleotide
  modified_base 11: mod_base = OTHER; note = 2'-O-methyl modified nucleotide
  modified_base 13: mod_base = OTHER; note = 2'-O-methyl modified nucleotide
  modified_base 23: mod_base = OTHER; note = 2'-O-methyl modified nucleotide
  modified_base 25: mod_base = OTHER; note = 2'-O-methyl modified nucleotide
  modified_base 26: mod_base = OTHER; note = 2'-O-methyl modified nucleotide
  modified_base 27: mod_base = OTHER; note = 2'-O-methyl modified nucleotide
aggtgtatagtttcatgctcacatatt

SEQ ID NO: 1471 - RNA, 27 nt, synthetic construct
  source 1..27: mol_type = other RNA
  modified_base 1: mod_base = OTHER; note = 2'-O-methyl modified nucleotide
  modified_base 2: mod_base = OTHER; note = 2'-O-methyl modified nucleotide
  modified_base 3: mod_base = OTHER; note = 2'-O-methyl modified nucleotide
  modified_base 4: mod_base = OTHER; note = 2'-O-methyl modified nucleotide
  modified_base 11: mod_base = OTHER; note = 2'-O-methyl modified nucleotide
  modified_base 13: mod_base = OTHER; note = 2'-O-methyl modified nucleotide
  modified_base 23: mod_base = OTHER; note = 2'-O-methyl modified nucleotide
  modified_base 25: mod_base = OTHER; note = 2'-O-methyl modified nucleotide
  modified_base 26: mod_base = OTHER; note = 2'-O-methyl modified nucleotide
  modified_base 27: mod_base = OTHER; note = 2'-O-methyl modified nucleotide
taggttcatagtttcatgctcacatat

SEQ ID NO: 1472 - RNA, 27 nt, synthetic construct
  source 1..27: mol_type = other RNA
  modified_base 1: mod_base = OTHER; note = 2'-O-methyl modified nucleotide
  modified_base 2: mod_base = OTHER; note = 2'-O-methyl modified nucleotide
  modified_base 3: mod_base = OTHER; note = 2'-O-methyl modified nucleotide
  modified_base 4: mod_base = OTHER; note = 2'-O-methyl modified nucleotide
  modified_base 11: mod_base = OTHER; note = 2'-O-methyl modified nucleotide
  modified_base 13: mod_base = OTHER; note = 2'-O-methyl modified nucleotide
  modified_base 23: mod_base = OTHER; note = 2'-O-methyl modified nucleotide
  modified_base 25: mod_base = OTHER; note = 2'-O-methyl modified nucleotide
  modified_base 26: mod_base = OTHER; note = 2'-O-methyl modified nucleotide
  modified_base 27: mod_base = OTHER; note = 2'-O-methyl modified nucleotide
tatagttgcatagtttcatgctcacat

SEQ ID NO: 1473 - RNA, 27 nt, synthetic construct
  source 1..27: mol_type = other RNA
  modified_base 1: mod_base = OTHER; note = 2'-O-methyl modified nucleotide
  modified_base 2: mod_base = OTHER; note = 2'-O-methyl modified nucleotide
  modified_base 3: mod_base = OTHER; note = 2'-O-methyl modified nucleotide
  modified_base 4: mod_base = OTHER; note = 2'-O-methyl modified nucleotide
  modified_base 11: mod_base = OTHER; note = 2'-O-methyl modified nucleotide
  modified_base 13: mod_base = OTHER; note = 2'-O-methyl modified nucleotide
  modified_base 23: mod_base = OTHER; note = 2'-O-methyl modified nucleotide
  modified_base 25: mod_base = OTHER; note = 2'-O-methyl modified nucleotide
  modified_base 26: mod_base = OTHER; note = 2'-O-methyl modified nucleotide
  modified_base 27: mod_base = OTHER; note = 2'-O-methyl modified nucleotide
ttatatgtgcatagtttcatgctcaca

SEQ ID NO: 1474 - RNA, 27 nt, synthetic construct
  source 1..27: mol_type = other RNA
  modified_base 1: mod_base = OTHER; note = 2'-O-methyl modified nucleotide
  modified_base 2: mod_base = OTHER; note = 2'-O-methyl modified nucleotide
  modified_base 3: mod_base = OTHER; note = 2'-O-methyl modified nucleotide
  modified_base 4: mod_base = OTHER; note = 2'-O-methyl modified nucleotide
  modified_base 11: mod_base = OTHER; note = 2'-O-methyl modified nucleotide
  modified_base 13: mod_base = OTHER; note = 2'-O-methyl modified nucleotide
  modified_base 23: mod_base = OTHER; note = 2'-O-methyl modified nucleotide
  modified_base 25: mod_base = OTHER; note = 2'-O-methyl modified nucleotide
  modified_base 26: mod_base = OTHER; note = 2'-O-methyl modified nucleotide
  modified_base 27: mod_base = OTHER; note = 2'-O-methyl modified nucleotide
tttattggtgcatagtttcatgctcac

SEQ ID NO: 1475 - RNA, 27 nt, synthetic construct
  source 1..27: mol_type = other RNA
  modified_base 1: mod_base = OTHER; note = 2'-O-methyl modified nucleotide
  modified_base 2: mod_base = OTHER; note = 2'-O-methyl modified nucleotide
  modified_base 3: mod_base = OTHER; note = 2'-O-methyl modified nucleotide
  modified_base 4: mod_base = OTHER; note = 2'-O-methyl modified nucleotide
  modified_base 11: mod_base = OTHER; note = 2'-O-methyl modified nucleotide
  modified_base 13: mod_base = OTHER; note = 2'-O-methyl modified nucleotide
  modified_base 23: mod_base = OTHER; note = 2'-O-methyl modified nucleotide
  modified_base 25: mod_base = OTHER; note = 2'-O-methyl modified nucleotide
  modified_base 26: mod_base = OTHER; note = 2'-O-methyl modified nucleotide
  modified_base 27: mod_base = OTHER; note = 2'-O-methyl modified nucleotide
atttataggtgcatagtttcatgctca

SEQ ID NO: 1476 - RNA, 27 nt, synthetic construct
  source 1..27: mol_type = other RNA
  modified_base 1: mod_base = OTHER; note = 2'-O-methyl modified nucleotide
  modified_base 2: mod_base = OTHER; note = 2'-O-methyl modified nucleotide
  modified_base 3: mod_base = OTHER; note = 2'-O-methyl modified nucleotide
  modified_base 4: mod_base = OTHER; note = 2'-O-methyl modified nucleotide
  modified_base 11: mod_base = OTHER; note = 2'-O-methyl modified nucleotide
  modified_base 13: mod_base = OTHER; note = 2'-O-methyl modified nucleotide
  modified_base 23: mod_base = OTHER; note = 2'-O-methyl modified nucleotide
  modified_base 25: mod_base = OTHER; note = 2'-O-methyl modified nucleotide
  modified_base 26: mod_base = OTHER; note = 2'-O-methyl modified nucleotide
  modified_base 27: mod_base = OTHER; note = 2'-O-methyl modified nucleotide
tatttttaggtgcatagtttcatgctc

SEQ ID NO: 1477 - RNA, 27 nt, synthetic construct
  source 1..27: mol_type = other RNA
  modified_base 1: mod_base = OTHER; note = 2'-O-methyl modified nucleotide
  modified_base 2: mod_base = OTHER; note = 2'-O-methyl modified nucleotide
  modified_base 3: mod_base = OTHER; note = 2'-O-methyl modified nucleotide
  modified_base 4: mod_base = OTHER; note = 2'-O-methyl modified nucleotide
  modified_base 11: mod_base = OTHER; note = 2'-O-methyl modified nucleotide
  modified_base 13: mod_base = OTHER; note = 2'-O-methyl modified nucleotide
  modified_base 23: mod_base = OTHER; note = 2'-O-methyl modified nucleotide
  modified_base 25: mod_base = OTHER; note = 2'-O-methyl modified nucleotide
  modified_base 26: mod_base = OTHER; note = 2'-O-methyl modified nucleotide
  modified_base 27: mod_base = OTHER; note = 2'-O-methyl modified nucleotide
gtatttataggtgcatagtttcatgct

SEQ ID NO: 1478 - RNA, 27 nt, synthetic construct
  source 1..27: mol_type = other RNA
  modified_base 1: mod_base = OTHER; note = 2'-O-methyl modified nucleotide
  modified_base 2: mod_base = OTHER; note = 2'-O-methyl modified nucleotide
  modified_base 3: mod_base = OTHER; note = 2'-O-methyl modified nucleotide
  modified_base 4: mod_base = OTHER; note = 2'-O-methyl modified nucleotide
  modified_base 11: mod_base = OTHER; note = 2'-O-methyl modified nucleotide
  modified_base 13: mod_base = OTHER; note = 2'-O-methyl modified nucleotide
  modified_base 23: mod_base = OTHER; note = 2'-O-methyl modified nucleotide
  modified_base 25: mod_base = OTHER; note = 2'-O-methyl modified nucleotide
  modified_base 26: mod_base = OTHER; note = 2'-O-methyl modified nucleotide
  modified_base 27: mod_base = OTHER; note = 2'-O-methyl modified nucleotide
agtatttataggtgcatagtttcatgc

SEQ ID NO: 1479 - RNA, 27 nt, synthetic construct
  source 1..27: mol_type = other RNA
  modified_base 1: mod_base = OTHER; note = 2'-O-methyl modified nucleotide
  modified_base 2: mod_base = OTHER; note = 2'-O-methyl modified nucleotide
  modified_base 3: mod_base = OTHER; note = 2'-O-methyl modified nucleotide
  modified_base 4: mod_base = OTHER; note = 2'-O-methyl modified nucleotide
  modified_base 11: mod_base = OTHER; note = 2'-O-methyl modified nucleotide
  modified_base 13: mod_base = OTHER; note = 2'-O-methyl modified nucleotide
  modified_base 23: mod_base = OTHER; note = 2'-O-methyl modified nucleotide
  modified_base 25: mod_base = OTHER; note = 2'-O-methyl modified nucleotide
  modified_base 26: mod_base = OTHER; note = 2'-O-methyl modified nucleotide
  modified_base 27: mod_base = OTHER; note = 2'-O-methyl modified nucleotide
tagtatttataggtgcatagtttcatg

SEQ ID NO: 1480 - RNA, 27 nt, synthetic construct
  source 1..27: mol_type = other RNA
  modified_base 1: mod_base = OTHER; note = 2'-O-methyl modified nucleotide
  modified_base 2: mod_base = OTHER; note = 2'-O-methyl modified nucleotide
  modified_base 3: mod_base = OTHER; note = 2'-O-methyl modified nucleotide
  modified_base 4: mod_base = OTHER; note = 2'-O-methyl modified nucleotide
  modified_base 11: mod_base = OTHER; note = 2'-O-methyl modified nucleotide
  modified_base 13: mod_base = OTHER; note = 2'-O-methyl modified nucleotide
  modified_base 23: mod_base = OTHER; note = 2'-O-methyl modified nucleotide
  modified_base 25: mod_base = OTHER; note = 2'-O-methyl modified nucleotide
  modified_base 26: mod_base = OTHER; note = 2'-O-methyl modified nucleotide
  modified_base 27: mod_base = OTHER; note = 2'-O-methyl modified nucleotide
ttagtttttataggtgcatagtttcat

SEQ ID NO: 1481 - RNA, 27 nt, synthetic construct
  source 1..27: mol_type = other RNA
  modified_base 1: mod_base = OTHER; note = 2'-O-methyl modified nucleotide
  modified_base 2: mod_base = OTHER; note = 2'-O-methyl modified nucleotide
  modified_base 3: mod_base = OTHER; note = 2'-O-methyl modified nucleotide
  modified_base 4: mod_base = OTHER; note = 2'-O-methyl modified nucleotide
  modified_base 11: mod_base = OTHER; note = 2'-O-methyl modified nucleotide
  modified_base 13: mod_base = OTHER; note = 2'-O-methyl modified nucleotide
  modified_base 23: mod_base = OTHER; note = 2'-O-methyl modified nucleotide
  modified_base 25: mod_base = OTHER; note = 2'-O-methyl modified nucleotide
  modified_base 26: mod_base = OTHER; note = 2'-O-methyl modified nucleotide
  modified_base 27: mod_base = OTHER; note = 2'-O-methyl modified nucleotide
tttagtatttataggtgcatagtttca

SEQ ID NO: 1482 - RNA, 27 nt, synthetic construct
  source 1..27: mol_type = other RNA
  modified_base 1: mod_base = OTHER; note = 2'-O-methyl modified nucleotide
  modified_base 2: mod_base = OTHER; note = 2'-O-methyl modified nucleotide
  modified_base 3: mod_base = OTHER; note = 2'-O-methyl modified nucleotide
  modified_base 4: mod_base = OTHER; note = 2'-O-methyl modified nucleotide
  modified_base 11: mod_base = OTHER; note = 2'-O-methyl modified nucleotide
  modified_base 13: mod_base = OTHER; note = 2'-O-methyl modified nucleotide
  modified_base 23: mod_base = OTHER; note = 2'-O-methyl modified nucleotide
  modified_base 25: mod_base = OTHER; note = 2'-O-methyl modified nucleotide
  modified_base 26: mod_base = OTHER; note = 2'-O-methyl modified nucleotide
  modified_base 27: mod_base = OTHER; note = 2'-O-methyl modified nucleotide
atttattatttataggtgcatagtttc

SEQ ID NO: 1483 - RNA, 27 nt, synthetic construct
  source 1..27: mol_type = other RNA
  modified_base 1: mod_base = OTHER; note = 2'-O-methyl modified nucleotide
  modified_base 2: mod_base = OTHER; note = 2'-O-methyl modified nucleotide
  modified_base 3: mod_base = OTHER; note = 2'-O-methyl modified nucleotide
  modified_base 4: mod_base = OTHER; note = 2'-O-methyl modified nucleotide
  modified_base 11: mod_base = OTHER; note = 2'-O-methyl modified nucleotide
  modified_base 13: mod_base = OTHER; note = 2'-O-methyl modified nucleotide
  modified_base 23: mod_base = OTHER; note = 2'-O-methyl modified nucleotide
  modified_base 25: mod_base = OTHER; note = 2'-O-methyl modified nucleotide
  modified_base 26: mod_base = OTHER; note = 2'-O-methyl modified nucleotide
  modified_base 27: mod_base = OTHER; note = 2'-O-methyl modified nucleotide
tattttgtatttataggtgcatagttt

SEQ ID NO: 1484 - RNA, 27 nt, synthetic construct
  source 1..27: mol_type = other RNA
  modified_base 1: mod_base = OTHER; note = 2'-O-methyl modified nucleotide
  modified_base 2: mod_base = OTHER; note = 2'-O-methyl modified nucleotide
  modified_base 3: mod_base = OTHER; note = 2'-O-methyl modified nucleotide
  modified_base 4: mod_base = OTHER; note = 2'-O-methyl modified nucleotide
  modified_base 11: mod_base = OTHER; note = 2'-O-methyl modified nucleotide
  modified_base 13: mod_base = OTHER; note = 2'-O-methyl modified nucleotide
  modified_base 23: mod_base = OTHER; note = 2'-O-methyl modified nucleotide
  modified_base 25: mod_base = OTHER; note = 2'-O-methyl modified nucleotide
  modified_base 26: mod_base = OTHER; note = 2'-O-methyl modified nucleotide
  modified_base 27: mod_base = OTHER; note = 2'-O-methyl modified nucleotide
atatttagtatttataggtgcatagtt

SEQ ID NO: 1485 - RNA, 27 nt, synthetic construct
  source 1..27: mol_type = other RNA
  modified_base 1: mod_base = OTHER; note = 2'-O-methyl modified nucleotide
  modified_base 2: mod_base = OTHER; note = 2'-O-methyl modified nucleotide
  modified_base 3: mod_base = OTHER; note = 2'-O-methyl modified nucleotide
  modified_base 4: mod_base = OTHER; note = 2'-O-methyl modified nucleotide
  modified_base 11: mod_base = OTHER; note = 2'-O-methyl modified nucleotide
  modified_base 13: mod_base = OTHER; note = 2'-O-methyl modified nucleotide
  modified_base 23: mod_base = OTHER; note = 2'-O-methyl modified nucleotide
  modified_base 25: mod_base = OTHER; note = 2'-O-methyl modified nucleotide
  modified_base 26: mod_base = OTHER; note = 2'-O-methyl modified nucleotide
  modified_base 27: mod_base = OTHER; note = 2'-O-methyl modified nucleotide
catatttagtatttataggtgcatagt

SEQ ID NO: 1486 - RNA, 27 nt, synthetic construct
  source 1..27: mol_type = other RNA
  modified_base 1: mod_base = OTHER; note = 2'-O-methyl modified nucleotide
  modified_base 2: mod_base = OTHER; note = 2'-O-methyl modified nucleotide
  modified_base 3: mod_base = OTHER; note = 2'-O-methyl modified nucleotide
  modified_base 4: mod_base = OTHER; note = 2'-O-methyl modified nucleotide
  modified_base 11: mod_base = OTHER; note = 2'-O-methyl modified nucleotide
  modified_base 13: mod_base = OTHER; note = 2'-O-methyl modified nucleotide
  modified_base 23: mod_base = OTHER; note = 2'-O-methyl modified nucleotide
  modified_base 25: mod_base = OTHER; note = 2'-O-methyl modified nucleotide
  modified_base 26: mod_base = OTHER; note = 2'-O-methyl modified nucleotide
  modified_base 27: mod_base = OTHER; note = 2'-O-methyl modified nucleotide
tcatatttagtatttataggtgcatag

SEQ ID NO: 1487 - RNA, 27 nt, synthetic construct
  source 1..27: mol_type = other RNA
  modified_base 1: mod_base = OTHER; note = 2'-O-methyl modified nucleotide
  modified_base 2: mod_base = OTHER; note = 2'-O-methyl modified nucleotide
  modified_base 3: mod_base = OTHER; note = 2'-O-methyl modified nucleotide
  modified_base 4: mod_base = OTHER; note = 2'-O-methyl modified nucleotide
  modified_base 11: mod_base = OTHER; note = 2'-O-methyl modified nucleotide
  modified_base 13: mod_base = OTHER; note = 2'-O-methyl modified nucleotide
  modified_base 23: mod_base = OTHER; note = 2'-O-methyl modified nucleotide
  modified_base 25: mod_base = OTHER; note = 2'-O-methyl modified nucleotide
  modified_base 26: mod_base = OTHER; note = 2'-O-methyl modified nucleotide
  modified_base 27: mod_base = OTHER; note = 2'-O-methyl modified nucleotide
taattttcaccatttatatacaaacac

SEQ ID NO: 1488 - RNA, 27 nt, synthetic construct
  source 1..27: mol_type = other RNA
  modified_base 1: mod_base = OTHER; note = 2'-O-methyl modified nucleotide
  modified_base 2: mod_base = OTHER; note = 2'-O-methyl modified nucleotide
  modified_base 3: mod_base = OTHER; note = 2'-O-methyl modified nucleotide
  modified_base 4: mod_base = OTHER; note = 2'-O-methyl modified nucleotide
  modified_base 11: mod_base = OTHER; note = 2'-O-methyl modified nucleotide
  modified_base 13: mod_base = OTHER; note = 2'-O-methyl modified nucleotide
  modified_base 23: mod_base = OTHER; note = 2'-O-methyl modified nucleotide
  modified_base 25: mod_base = OTHER; note = 2'-O-methyl modified nucleotide
  modified_base 26: mod_base = OTHER; note = 2'-O-methyl modified nucleotide
  modified_base 27: mod_base = OTHER; note = 2'-O-methyl modified nucleotide
ttaattctcaccatttatatacaaaca

SEQ ID NO: 1489 - RNA, 27 nt, synthetic construct
  source 1..27: mol_type = other RNA
  modified_base 1: mod_base = OTHER; note = 2'-O-methyl modified nucleotide
  modified_base 2: mod_base = OTHER; note = 2'-O-methyl modified nucleotide
  modified_base 3: mod_base = OTHER; note = 2'-O-methyl modified nucleotide
  modified_base 4: mod_base = OTHER; note = 2'-O-methyl modified nucleotide
  modified_base 11: mod_base = OTHER; note = 2'-O-methyl modified nucleotide
  modified_base 13: mod_base = OTHER; note = 2'-O-methyl modified nucleotide
  modified_base 23: mod_base = OTHER; note = 2'-O-methyl modified nucleotide
  modified_base 25: mod_base = OTHER; note = 2'-O-methyl modified nucleotide
  modified_base 26: mod_base = OTHER; note = 2'-O-methyl modified nucleotide
  modified_base 27: mod_base = OTHER; note = 2'-O-methyl modified nucleotide
tttaattctcaccatttatatacaaac

SEQ ID NO: 1490 - RNA, 27 nt, synthetic construct
  source 1..27: mol_type = other RNA
  modified_base 1: mod_base = OTHER; note = 2'-O-methyl modified nucleotide
  modified_base 2: mod_base = OTHER; note = 2'-O-methyl modified nucleotide
  modified_base 3: mod_base = OTHER; note = 2'-O-methyl modified nucleotide
  modified_base 4: mod_base = OTHER; note = 2'-O-methyl modified nucleotide
  modified_base 11: mod_base = OTHER; note = 2'-O-methyl modified nucleotide
  modified_base 13: mod_base = OTHER; note = 2'-O-methyl modified nucleotide
  modified_base 23: mod_base = OTHER; note = 2'-O-methyl modified nucleotide
  modified_base 25: mod_base = OTHER; note = 2'-O-methyl modified nucleotide
  modified_base 26: mod_base = OTHER; note = 2'-O-methyl modified nucleotide
  modified_base 27: mod_base = OTHER; note = 2'-O-methyl modified nucleotide
ttttatttctcaccatttatatacaaa

SEQ ID NO: 1491 - RNA, 27 nt, synthetic construct
  source 1..27: mol_type = other RNA
  modified_base 1: mod_base = OTHER; note = 2'-O-methyl modified nucleotide
  modified_base 2: mod_base = OTHER; note = 2'-O-methyl modified nucleotide
  modified_base 3: mod_base = OTHER; note = 2'-O-methyl modified nucleotide
  modified_base 4: mod_base = OTHER; note = 2'-O-methyl modified nucleotide
  modified_base 11: mod_base = OTHER; note = 2'-O-methyl modified nucleotide
  modified_base 13: mod_base = OTHER; note = 2'-O-methyl modified nucleotide
  modified_base 23: mod_base = OTHER; note = 2'-O-methyl modified nucleotide
  modified_base 25: mod_base = OTHER; note = 2'-O-methyl modified nucleotide
  modified_base 26: mod_base = OTHER; note = 2'-O-methyl modified nucleotide
  modified_base 27: mod_base = OTHER; note = 2'-O-methyl modified nucleotide
atttttattctcaccatttatatacaa

SEQ ID NO: 1492 - RNA, 27 nt, synthetic construct
  source 1..27: mol_type = other RNA
  modified_base 1: mod_base = OTHER; note = 2'-O-methyl modified nucleotide
  modified_base 2: mod_base = OTHER; note = 2'-O-methyl modified nucleotide
  modified_base 3: mod_base = OTHER; note = 2'-O-methyl modified nucleotide
  modified_base 4: mod_base = OTHER; note = 2'-O-methyl modified nucleotide
  modified_base 11: mod_base = OTHER; note = 2'-O-methyl modified nucleotide
  modified_base 13: mod_base = OTHER; note = 2'-O-methyl modified nucleotide
  modified_base 23: mod_base = OTHER; note = 2'-O-methyl modified nucleotide
  modified_base 25: mod_base = OTHER; note = 2'-O-methyl modified nucleotide
  modified_base 26: mod_base = OTHER; note = 2'-O-methyl modified nucleotide
  modified_base 27: mod_base = OTHER; note = 2'-O-methyl modified nucleotide
tattttaattctcaccatttatataca

SEQ ID NO: 1493 - RNA, 27 nt, synthetic construct
  source 1..27: mol_type = other RNA
  modified_base 1: mod_base = OTHER; note = 2'-O-methyl modified nucleotide
  modified_base 2: mod_base = OTHER; note = 2'-O-methyl modified nucleotide
  modified_base 3: mod_base = OTHER; note = 2'-O-methyl modified nucleotide
  modified_base 4: mod_base = OTHER; note = 2'-O-methyl modified nucleotide
  modified_base 11: mod_base = OTHER; note = 2'-O-methyl modified nucleotide
  modified_base 13: mod_base = OTHER; note = 2'-O-methyl modified nucleotide
  modified_base 23: mod_base = OTHER; note = 2'-O-methyl modified nucleotide
  modified_base 25: mod_base = OTHER; note = 2'-O-methyl modified nucleotide
  modified_base 26: mod_base = OTHER; note = 2'-O-methyl modified nucleotide
  modified_base 27: mod_base = OTHER; note = 2'-O-methyl modified nucleotide
ttattttaattctcaccatttatatac

SEQ ID NO: 1494 - RNA, 27 nt, synthetic construct
  source 1..27: mol_type = other RNA
  modified_base 1: mod_base = OTHER; note = 2'-O-methyl modified nucleotide
  modified_base 2: mod_base = OTHER; note = 2'-O-methyl modified nucleotide
  modified_base 3: mod_base = OTHER; note = 2'-O-methyl modified nucleotide
  modified_base 4: mod_base = OTHER; note = 2'-O-methyl modified nucleotide
  modified_base 11: mod_base = OTHER; note = 2'-O-methyl modified nucleotide
  modified_base 13: mod_base = OTHER; note = 2'-O-methyl modified nucleotide
  modified_base 23: mod_base = OTHER; note = 2'-O-methyl modified nucleotide
  modified_base 25: mod_base = OTHER; note = 2'-O-methyl modified nucleotide
  modified_base 26: mod_base = OTHER; note = 2'-O-methyl modified nucleotide
  modified_base 27: mod_base = OTHER; note = 2'-O-methyl modified nucleotide
tttattttaattctcaccatttatata

SEQ ID NO: 1495 - RNA, 27 nt, synthetic construct
  source 1..27: mol_type = other RNA
  modified_base 1: mod_base = OTHER; note = 2'-O-methyl modified nucleotide
  modified_base 2: mod_base = OTHER; note = 2'-O-methyl modified nucleotide
  modified_base 3: mod_base = OTHER; note = 2'-O-methyl modified nucleotide
  modified_base 4: mod_base = OTHER; note = 2'-O-methyl modified nucleotide
  modified_base 11: mod_base = OTHER; note = 2'-O-methyl modified nucleotide
  modified_base 13: mod_base = OTHER; note = 2'-O-methyl modified nucleotide
  modified_base 23: mod_base = OTHER; note = 2'-O-methyl modified nucleotide
  modified_base 25: mod_base = OTHER; note = 2'-O-methyl modified nucleotide
  modified_base 26: mod_base = OTHER; note = 2'-O-methyl modified nucleotide
  modified_base 27: mod_base = OTHER; note = 2'-O-methyl modified nucleotide
ttttattttaattctcaccatttatat

SEQ ID NO: 1496 - RNA, 27 nt, synthetic construct
  source 1..27: mol_type = other RNA
  modified_base 1: mod_base = OTHER; note = 2'-O-methyl modified nucleotide
  modified_base 2: mod_base = OTHER; note = 2'-O-methyl modified nucleotide
  modified_base 3: mod_base = OTHER; note = 2'-O-methyl modified nucleotide
  modified_base 4: mod_base = OTHER; note = 2'-O-methyl modified nucleotide
  modified_base 11: mod_base = OTHER; note = 2'-O-methyl modified nucleotide
  modified_base 13: mod_base = OTHER; note = 2'-O-methyl modified nucleotide
  modified_base 23: mod_base = OTHER; note = 2'-O-methyl modified nucleotide
  modified_base 25: mod_base = OTHER; note = 2'-O-methyl modified nucleotide
  modified_base 26: mod_base = OTHER; note = 2'-O-methyl modified nucleotide
  modified_base 27: mod_base = OTHER; note = 2'-O-methyl modified nucleotide
gtttttttttaattctcaccatttata

SEQ ID NO: 1497 - RNA, 27 nt, synthetic construct
  source 1..27: mol_type = other RNA
  modified_base 1: mod_base = OTHER; note = 2'-O-methyl modified nucleotide
  modified_base 2: mod_base = OTHER; note = 2'-O-methyl modified nucleotide
  modified_base 3: mod_base = OTHER; note = 2'-O-methyl modified nucleotide
  modified_base 4: mod_base = OTHER; note = 2'-O-methyl modified nucleotide
  modified_base 11: mod_base = OTHER; note = 2'-O-methyl modified nucleotide
  modified_base 13: mod_base = OTHER; note = 2'-O-methyl modified nucleotide
  modified_base 23: mod_base = OTHER; note = 2'-O-methyl modified nucleotide
  modified_base 25: mod_base = OTHER; note = 2'-O-methyl modified nucleotide
  modified_base 26: mod_base = OTHER; note = 2'-O-methyl modified nucleotide
  modified_base 27: mod_base = OTHER; note = 2'-O-methyl modified nucleotide
cgttttattttaattctcaccatttat

SEQ ID NO: 1498 - RNA, 27 nt, synthetic construct
  source 1..27: mol_type = other RNA
  modified_base 1: mod_base = OTHER; note = 2'-O-methyl modified nucleotide
  modified_base 2: mod_base = OTHER; note = 2'-O-methyl modified nucleotide
  modified_base 3: mod_base = OTHER; note = 2'-O-methyl modified nucleotide
  modified_base 4: mod_base = OTHER; note = 2'-O-methyl modified nucleotide
  modified_base 11: mod_base = OTHER; note = 2'-O-methyl modified nucleotide
  modified_base 13: mod_base = OTHER; note = 2'-O-methyl modified nucleotide
  modified_base 23: mod_base = OTHER; note = 2'-O-methyl modified nucleotide
  modified_base 25: mod_base = OTHER; note = 2'-O-methyl modified nucleotide
  modified_base 26: mod_base = OTHER; note = 2'-O-methyl modified nucleotide
  modified_base 27: mod_base = OTHER; note = 2'-O-methyl modified nucleotide
acgttttattttaattctcaccattta

SEQ ID NO: 1499 - RNA, 27 nt, synthetic construct
  source 1..27: mol_type = other RNA
  modified_base 1: mod_base = OTHER; note = 2'-O-methyl modified nucleotide
  modified_base 2: mod_base = OTHER; note = 2'-O-methyl modified nucleotide
  modified_base 3: mod_base = OTHER; note = 2'-O-methyl modified nucleotide
  modified_base 4: mod_base = OTHER; note = 2'-O-methyl modified nucleotide
  modified_base 11: mod_base = OTHER; note = 2'-O-methyl modified nucleotide
  modified_base 13: mod_base = OTHER; note = 2'-O-methyl modified nucleotide
  modified_base 23: mod_base = OTHER; note = 2'-O-methyl modified nucleotide
  modified_base 25: mod_base = OTHER; note = 2'-O-methyl modified nucleotide
  modified_base 26: mod_base = OTHER; note = 2'-O-methyl modified nucleotide
  modified_base 27: mod_base = OTHER; note = 2'-O-methyl modified nucleotide
aacgttttattttaattctcaccattt

SEQ ID NO: 1500 - RNA, 27 nt, synthetic construct
  source 1..27: mol_type = other RNA
  modified_base 1: mod_base = OTHER; note = 2'-O-methyl modified nucleotide
  modified_base 2: mod_base = OTHER; note = 2'-O-methyl modified nucleotide
  modified_base 3: mod_base = OTHER; note = 2'-O-methyl modified nucleotide
  modified_base 4: mod_base = OTHER; note = 2'-O-methyl modified nucleotide
  modified_base 11: mod_base = OTHER; note = 2'-O-methyl modified nucleotide
  modified_base 13: mod_base = OTHER; note = 2'-O-methyl modified nucleotide
  modified_base 23: mod_base = OTHER; note = 2'-O-methyl modified nucleotide
  modified_base 25: mod_base = OTHER; note = 2'-O-methyl modified nucleotide
  modified_base 26: mod_base = OTHER; note = 2'-O-methyl modified nucleotide
  modified_base 27: mod_base = OTHER; note = 2'-O-methyl modified nucleotide
taacgttttattttaattctcaccatt

SEQ ID NO: 1501 - RNA, 27 nt, synthetic construct
  source 1..27: mol_type = other RNA
  modified_base 1: mod_base = OTHER; note = 2'-O-methyl modified nucleotide
  modified_base 2: mod_base = OTHER; note = 2'-O-methyl modified nucleotide
  modified_base 3: mod_base = OTHER; note = 2'-O-methyl modified nucleotide
  modified_base 4: mod_base = OTHER; note = 2'-O-methyl modified nucleotide
  modified_base 11: mod_base = OTHER; note = 2'-O-methyl modified nucleotide
  modified_base 13: mod_base = OTHER; note = 2'-O-methyl modified nucleotide
  modified_base 23: mod_base = OTHER; note = 2'-O-methyl modified nucleotide
  modified_base 25: mod_base = OTHER; note = 2'-O-methyl modified nucleotide
  modified_base 26: mod_base = OTHER; note = 2'-O-methyl modified nucleotide
  modified_base 27: mod_base = OTHER; note = 2'-O-methyl modified nucleotide
ataactttttattttaattctcaccat

SEQ ID NO: 1502 - RNA, 27 nt, synthetic construct
  source 1..27: mol_type = other RNA
  modified_base 1: mod_base = OTHER; note = 2'-O-methyl modified nucleotide
  modified_base 2: mod_base = OTHER; note = 2'-O-methyl modified nucleotide
  modified_base 3: mod_base = OTHER; note = 2'-O-methyl modified nucleotide
  modified_base 4: mod_base = OTHER; note = 2'-O-methyl modified nucleotide
  modified_base 11: mod_base = OTHER; note = 2'-O-methyl modified nucleotide
  modified_base 13: mod_base = OTHER; note = 2'-O-methyl modified nucleotide
  modified_base 23: mod_base = OTHER; note = 2'-O-methyl modified nucleotide
  modified_base 25: mod_base = OTHER; note = 2'-O-methyl modified nucleotide
  modified_base 26: mod_base = OTHER; note = 2'-O-methyl modified nucleotide
  modified_base 27: mod_base = OTHER; note = 2'-O-methyl modified nucleotide
ttaaattgagatgggataaaaataaaa

SEQ ID NO: 1503 - RNA, 27 nt, synthetic construct
  source 1..27: mol_type = other RNA
  modified_base 1: mod_base = OTHER; note = 2'-O-methyl modified nucleotide
  modified_base 2: mod_base = OTHER; note = 2'-O-methyl modified nucleotide
  modified_base 3: mod_base = OTHER; note = 2'-O-methyl modified nucleotide
  modified_base 4: mod_base = OTHER; note = 2'-O-methyl modified nucleotide
  modified_base 11: mod_base = OTHER; note = 2'-O-methyl modified nucleotide
  modified_base 13: mod_base = OTHER; note = 2'-O-methyl modified nucleotide
  modified_base 23: mod_base = OTHER; note = 2'-O-methyl modified nucleotide
  modified_base 25: mod_base = OTHER; note = 2'-O-methyl modified nucleotide
  modified_base 26: mod_base = OTHER; note = 2'-O-methyl modified nucleotide
  modified_base 27: mod_base = OTHER; note = 2'-O-methyl modified nucleotide
tattatagtgagatgggataaaaataa

SEQ ID NO: 1504 - RNA, 27 nt, synthetic construct
  source 1..27: mol_type = other RNA
  modified_base 1: mod_base = OTHER; note = 2'-O-methyl modified nucleotide
  modified_base 2: mod_base = OTHER; note = 2'-O-methyl modified nucleotide
  modified_base 3: mod_base = OTHER; note = 2'-O-methyl modified nucleotide
  modified_base 4: mod_base = OTHER; note = 2'-O-methyl modified nucleotide
  modified_base 11: mod_base = OTHER; note = 2'-O-methyl modified nucleotide
  modified_base 13: mod_base = OTHER; note = 2'-O-methyl modified nucleotide
  modified_base 23: mod_base = OTHER; note = 2'-O-methyl modified nucleotide
  modified_base 25: mod_base = OTHER; note = 2'-O-methyl modified nucleotide
  modified_base 26: mod_base = OTHER; note = 2'-O-methyl modified nucleotide
  modified_base 27: mod_base = OTHER; note = 2'-O-methyl modified nucleotide
ttatttaagtgagatgggataaaaata

SEQ ID NO: 1505 - RNA, 27 nt, synthetic construct
  source 1..27: mol_type = other RNA
  modified_base 1: mod_base = OTHER; note = 2'-O-methyl modified nucleotide
  modified_base 2: mod_base = OTHER; note = 2'-O-methyl modified nucleotide
  modified_base 3: mod_base = OTHER; note = 2'-O-methyl modified nucleotide
  modified_base 4: mod_base = OTHER; note = 2'-O-methyl modified nucleotide
  modified_base 11: mod_base = OTHER; note = 2'-O-methyl modified nucleotide
  modified_base 13: mod_base = OTHER; note = 2'-O-methyl modified nucleotide
  modified_base 23: mod_base = OTHER; note = 2'-O-methyl modified nucleotide
  modified_base 25: mod_base = OTHER; note = 2'-O-methyl modified nucleotide
  modified_base 26: mod_base = OTHER; note = 2'-O-methyl modified nucleotide
  modified_base 27: mod_base = OTHER; note = 2'-O-methyl modified nucleotide
attattaaagtgagatgggataaaaat

SEQ ID NO: 1506 - RNA, 27 nt, synthetic construct
  source 1..27: mol_type = other RNA
  modified_base 1: mod_base = OTHER; note = 2'-O-methyl modified nucleotide
  modified_base 2: mod_base = OTHER; note = 2'-O-methyl modified nucleotide
  modified_base 3: mod_base = OTHER; note = 2'-O-methyl modified nucleotide
  modified_base 4: mod_base = OTHER; note = 2'-O-methyl modified nucleotide
  modified_base 11: mod_base = OTHER; note = 2'-O-methyl modified nucleotide
  modified_base 13: mod_base = OTHER; note = 2'-O-methyl modified nucleotide
  modified_base 23: mod_base = OTHER; note = 2'-O-methyl modified nucleotide
  modified_base 25: mod_base = OTHER; note = 2'-O-methyl modified nucleotide
  modified_base 26: mod_base = OTHER; note = 2'-O-methyl modified nucleotide
  modified_base 27: mod_base = OTHER; note = 2'-O-methyl modified nucleotide
tattattaaagtgagatgggataaaaa

SEQ ID NO: 1507 - RNA, 27 nt, synthetic construct
  source 1..27: mol_type = other RNA
  modified_base 1: mod_base = OTHER; note = 2'-O-methyl modified nucleotide
  modified_base 2: mod_base = OTHER; note = 2'-O-methyl modified nucleotide
  modified_base 3: mod_base = OTHER; note = 2'-O-methyl modified nucleotide
  modified_base 4: mod_base = OTHER; note = 2'-O-methyl modified nucleotide
  modified_base 11: mod_base = OTHER; note = 2'-O-methyl modified nucleotide
  modified_base 13: mod_base = OTHER; note = 2'-O-methyl modified nucleotide
  modified_base 23: mod_base = OTHER; note = 2'-O-methyl modified nucleotide
  modified_base 25: mod_base = OTHER; note = 2'-O-methyl modified nucleotide
  modified_base 26: mod_base = OTHER; note = 2'-O-methyl modified nucleotide
  modified_base 27: mod_base = OTHER; note = 2'-O-methyl modified nucleotide
ttatttttaaagtgagatgggataaaa

SEQ ID NO: 1508 - RNA, 27 nt, synthetic construct
  source 1..27: mol_type = other RNA
  modified_base 1: mod_base = OTHER; note = 2'-O-methyl modified nucleotide
  modified_base 2: mod_base = OTHER; note = 2'-O-methyl modified nucleotide
  modified_base 3: mod_base = OTHER; note = 2'-O-methyl modified nucleotide
  modified_base 4: mod_base = OTHER; note = 2'-O-methyl modified nucleotide
  modified_base 11: mod_base = OTHER; note = 2'-O-methyl modified nucleotide
  modified_base 13: mod_base = OTHER; note = 2'-O-methyl modified nucleotide
  modified_base 23: mod_base = OTHER; note = 2'-O-methyl modified nucleotide
  modified_base 25: mod_base = OTHER; note = 2'-O-methyl modified nucleotide
  modified_base 26: mod_base = OTHER; note = 2'-O-methyl modified nucleotide
  modified_base 27: mod_base = OTHER; note = 2'-O-methyl modified nucleotide
tttattattaaagtgagatgggataaa

SEQ ID NO: 1509 - RNA, 27 nt, synthetic construct
  source 1..27: mol_type = other RNA
  modified_base 1: mod_base = OTHER; note = 2'-O-methyl modified nucleotide
  modified_base 2: mod_base = OTHER; note = 2'-O-methyl modified nucleotide
  modified_base 3: mod_base = OTHER; note = 2'-O-methyl modified nucleotide
  modified_base 4: mod_base = OTHER; note = 2'-O-methyl modified nucleotide
  modified_base 11: mod_base = OTHER; note = 2'-O-methyl modified nucleotide
  modified_base 13: mod_base = OTHER; note = 2'-O-methyl modified nucleotide
  modified_base 23: mod_base = OTHER; note = 2'-O-methyl modified nucleotide
  modified_base 25: mod_base = OTHER; note = 2'-O-methyl modified nucleotide
  modified_base 26: mod_base = OTHER; note = 2'-O-methyl modified nucleotide
  modified_base 27: mod_base = OTHER; note = 2'-O-methyl modified nucleotide
ttttattattaaagtgagatgggataa

SEQ ID NO: 1510 - RNA, 27 nt, synthetic construct
  source 1..27: mol_type = other RNA
  modified_base 1: mod_base = OTHER; note = 2'-O-methyl modified nucleotide
  modified_base 2: mod_base = OTHER; note = 2'-O-methyl modified nucleotide
  modified_base 3: mod_base = OTHER; note = 2'-O-methyl modified nucleotide
  modified_base 4: mod_base = OTHER; note = 2'-O-methyl modified nucleotide
  modified_base 11: mod_base = OTHER; note = 2'-O-methyl modified nucleotide
  modified_base 13: mod_base = OTHER; note = 2'-O-methyl modified nucleotide
  modified_base 23: mod_base = OTHER; note = 2'-O-methyl modified nucleotide
  modified_base 25: mod_base = OTHER; note = 2'-O-methyl modified nucleotide
  modified_base 26: mod_base = OTHER; note = 2'-O-methyl modified nucleotide
  modified_base 27: mod_base = OTHER; note = 2'-O-methyl modified nucleotide
ttttttttattaaagtgagatgggata

SEQ ID NO: 1511 - RNA, 27 nt, synthetic construct
  source 1..27: mol_type = other RNA
  modified_base 1: mod_base = OTHER; note = 2'-O-methyl modified nucleotide
  modified_base 2: mod_base = OTHER; note = 2'-O-methyl modified nucleotide
  modified_base 3: mod_base = OTHER; note = 2'-O-methyl modified nucleotide
  modified_base 4: mod_base = OTHER; note = 2'-O-methyl modified nucleotide
  modified_base 11: mod_base = OTHER; note = 2'-O-methyl modified nucleotide
  modified_base 13: mod_base = OTHER; note = 2'-O-methyl modified nucleotide
  modified_base 23: mod_base = OTHER; note = 2'-O-methyl modified nucleotide
  modified_base 25: mod_base = OTHER; note = 2'-O-methyl modified nucleotide
  modified_base 26: mod_base = OTHER; note = 2'-O-methyl modified nucleotide
  modified_base 27: mod_base = OTHER; note = 2'-O-methyl modified nucleotide
atttttattattaaagtgagatgggat

SEQ ID NO: 1512 - RNA, 27 nt, synthetic construct
  source 1..27: mol_type = other RNA
  modified_base 1: mod_base = OTHER; note = 2'-O-methyl modified nucleotide
  modified_base 2: mod_base = OTHER; note = 2'-O-methyl modified nucleotide
  modified_base 3: mod_base = OTHER; note = 2'-O-methyl modified nucleotide
  modified_base 4: mod_base = OTHER; note = 2'-O-methyl modified nucleotide
  modified_base 11: mod_base = OTHER; note = 2'-O-methyl modified nucleotide
  modified_base 13: mod_base = OTHER; note = 2'-O-methyl modified nucleotide
  modified_base 23: mod_base = OTHER; note = 2'-O-methyl modified nucleotide
  modified_base 25: mod_base = OTHER; note = 2'-O-methyl modified nucleotide
  modified_base 26: mod_base = OTHER; note = 2'-O-methyl modified nucleotide
  modified_base 27: mod_base = OTHER; note = 2'-O-methyl modified nucleotide
gatttttattattaaagtgagatggga

SEQ ID NO: 1513 - RNA, 27 nt, synthetic construct
  source 1..27: mol_type = other RNA
  modified_base 1: mod_base = OTHER; note = 2'-O-methyl modified nucleotide
  modified_base 2: mod_base = OTHER; note = 2'-O-methyl modified nucleotide
  modified_base 3: mod_base = OTHER; note = 2'-O-methyl modified nucleotide
  modified_base 4: mod_base = OTHER; note = 2'-O-methyl modified nucleotide
  modified_base 11: mod_base = OTHER; note = 2'-O-methyl modified nucleotide
  modified_base 13: mod_base = OTHER; note = 2'-O-methyl modified nucleotide
  modified_base 23: mod_base = OTHER; note = 2'-O-methyl modified nucleotide
  modified_base 25: mod_base = OTHER; note = 2'-O-methyl modified nucleotide
  modified_base 26: mod_base = OTHER; note = 2'-O-methyl modified nucleotide
  modified_base 27: mod_base = OTHER; note = 2'-O-methyl modified nucleotide
tgatttttattattaaagtgagatggg

SEQ ID NO: 1514 - RNA, 27 nt, synthetic construct
  source 1..27: mol_type = other RNA
  modified_base 1: mod_base = OTHER; note = 2'-O-methyl modified nucleotide
  modified_base 2: mod_base = OTHER; note = 2'-O-methyl modified nucleotide
  modified_base 3: mod_base = OTHER; note = 2'-O-methyl modified nucleotide
  modified_base 4: mod_base = OTHER; note = 2'-O-methyl modified nucleotide
  modified_base 11: mod_base = OTHER; note = 2'-O-methyl modified nucleotide
  modified_base 13: mod_base = OTHER; note = 2'-O-methyl modified nucleotide
  modified_base 23: mod_base = OTHER; note = 2'-O-methyl modified nucleotide
  modified_base 25: mod_base = OTHER; note = 2'-O-methyl modified nucleotide
  modified_base 26: mod_base = OTHER; note = 2'-O-methyl modified nucleotide
  modified_base 27: mod_base = OTHER; note = 2'-O-methyl modified nucleotide
atgatttttattattaaagtgagatgg

SEQ ID NO: 1515 - RNA, 27 nt, synthetic construct
  source 1..27: mol_type = other RNA
  modified_base 1: mod_base = OTHER; note = 2'-O-methyl modified nucleotide
  modified_base 2: mod_base = OTHER; note = 2'-O-methyl modified nucleotide
  modified_base 3: mod_base = OTHER; note = 2'-O-methyl modified nucleotide
  modified_base 4: mod_base = OTHER; note = 2'-O-methyl modified nucleotide
  modified_base 11: mod_base = OTHER; note = 2'-O-methyl modified nucleotide
  modified_base 13: mod_base = OTHER; note = 2'-O-methyl modified nucleotide
  modified_base 23: mod_base = OTHER; note = 2'-O-methyl modified nucleotide
  modified_base 25: mod_base = OTHER; note = 2'-O-methyl modified nucleotide
  modified_base 26: mod_base = OTHER; note = 2'-O-methyl modified nucleotide
  modified_base 27: mod_base = OTHER; note = 2'-O-methyl modified nucleotide
catgatttttattattaaagtgagatg

SEQ ID NO: 1516 - RNA, 27 nt, synthetic construct
  source 1..27: mol_type = other RNA
  modified_base 1: mod_base = OTHER; note = 2'-O-methyl modified nucleotide
  modified_base 2: mod_base = OTHER; note = 2'-O-methyl modified nucleotide
  modified_base 3: mod_base = OTHER; note = 2'-O-methyl modified nucleotide
  modified_base 4: mod_base = OTHER; note = 2'-O-methyl modified nucleotide
  modified_base 11: mod_base = OTHER; note = 2'-O-methyl modified nucleotide
  modified_base 13: mod_base = OTHER; note = 2'-O-methyl modified nucleotide
  modified_base 23: mod_base = OTHER; note = 2'-O-methyl modified nucleotide
  modified_base 25: mod_base = OTHER; note = 2'-O-methyl modified nucleotide
  modified_base 26: mod_base = OTHER; note = 2'-O-methyl modified nucleotide
  modified_base 27: mod_base = OTHER; note = 2'-O-methyl modified nucleotide
gcatgttttttattattaaagtgagat

SEQ ID NO: 1517 - RNA, 27 nt, synthetic construct
  source 1..27: mol_type = other RNA
  modified_base 1: mod_base = OTHER; note = 2'-O-methyl modified nucleotide
  modified_base 2: mod_base = OTHER; note = 2'-O-methyl modified nucleotide
  modified_base 3: mod_base = OTHER; note = 2'-O-methyl modified nucleotide
  modified_base 4: mod_base = OTHER; note = 2'-O-methyl modified nucleotide
  modified_base 11: mod_base = OTHER; note = 2'-O-methyl modified nucleotide
  modified_base 13: mod_base = OTHER; note = 2'-O-methyl modified nucleotide
  modified_base 23: mod_base = OTHER; note = 2'-O-methyl modified nucleotide
  modified_base 25: mod_base = OTHER; note = 2'-O-methyl modified nucleotide
  modified_base 26: mod_base = OTHER; note = 2'-O-methyl modified nucleotide
  modified_base 27: mod_base = OTHER; note = 2'-O-methyl modified nucleotide
agcattatttttattattaaagtgaga

SEQ ID NO: 1518 - RNA, 27 nt, synthetic construct
  source 1..27: mol_type = other RNA
  modified_base 1: mod_base = OTHER; note = 2'-O-methyl modified nucleotide
  modified_base 2: mod_base = OTHER; note = 2'-O-methyl modified nucleotide
  modified_base 3: mod_base = OTHER; note = 2'-O-methyl modified nucleotide
  modified_base 4: mod_base = OTHER; note = 2'-O-methyl modified nucleotide
  modified_base 11: mod_base = OTHER; note = 2'-O-methyl modified nucleotide
  modified_base 13: mod_base = OTHER; note = 2'-O-methyl modified nucleotide
  modified_base 23: mod_base = OTHER; note = 2'-O-methyl modified nucleotide
  modified_base 25: mod_base = OTHER; note = 2'-O-methyl modified nucleotide
  modified_base 26: mod_base = OTHER; note = 2'-O-methyl modified nucleotide
  modified_base 27: mod_base = OTHER; note = 2'-O-methyl modified nucleotide
aagcatgatttttattattaaagtgag

SEQ ID NO: 1519 - RNA, 27 nt, synthetic construct
  source 1..27: mol_type = other RNA
  modified_base 1: mod_base = OTHER; note = 2'-O-methyl modified nucleotide
  modified_base 2: mod_base = OTHER; note = 2'-O-methyl modified nucleotide
  modified_base 3: mod_base = OTHER; note = 2'-O-methyl modified nucleotide
  modified_base 4: mod_base = OTHER; note = 2'-O-methyl modified nucleotide
  modified_base 11: mod_base = OTHER; note = 2'-O-methyl modified nucleotide
  modified_base 13: mod_base = OTHER; note = 2'-O-methyl modified nucleotide
  modified_base 23: mod_base = OTHER; note = 2'-O-methyl modified nucleotide
  modified_base 25: mod_base = OTHER; note = 2'-O-methyl modified nucleotide
  modified_base 26: mod_base = OTHER; note = 2'-O-methyl modified nucleotide
  modified_base 27: mod_base = OTHER; note = 2'-O-methyl modified nucleotide
ttctataattcctccttcttcaaatgg

SEQ ID NO: 1520 - RNA, 27 nt, synthetic construct
  source 1..27: mol_type = other RNA
  modified_base 1: mod_base = OTHER; note = 2'-O-methyl modified nucleotide
  modified_base 2: mod_base = OTHER; note = 2'-O-methyl modified nucleotide
  modified_base 3: mod_base = OTHER; note = 2'-O-methyl modified nucleotide
  modified_base 4: mod_base = OTHER; note = 2'-O-methyl modified nucleotide
  modified_base 11: mod_base = OTHER; note = 2'-O-methyl modified nucleotide
  modified_base 13: mod_base = OTHER; note = 2'-O-methyl modified nucleotide
  modified_base 23: mod_base = OTHER; note = 2'-O-methyl modified nucleotide
  modified_base 25: mod_base = OTHER; note = 2'-O-methyl modified nucleotide
  modified_base 26: mod_base = OTHER; note = 2'-O-methyl modified nucleotide
  modified_base 27: mod_base = OTHER; note = 2'-O-methyl modified nucleotide
attttttctacctcttctaaaattcct

SEQ ID NO: 1521 - RNA, 27 nt, synthetic construct
  source 1..27: mol_type = other RNA
  modified_base 1: mod_base = OTHER; note = 2'-O-methyl modified nucleotide
  modified_base 2: mod_base = OTHER; note = 2'-O-methyl modified nucleotide
  modified_base 3: mod_base = OTHER; note = 2'-O-methyl modified nucleotide
  modified_base 4: mod_base = OTHER; note = 2'-O-methyl modified nucleotide
  modified_base 11: mod_base = OTHER; note = 2'-O-methyl modified nucleotide
  modified_base 13: mod_base = OTHER; note = 2'-O-methyl modified nucleotide
  modified_base 23: mod_base = OTHER; note = 2'-O-methyl modified nucleotide
  modified_base 25: mod_base = OTHER; note = 2'-O-methyl modified nucleotide
  modified_base 26: mod_base = OTHER; note = 2'-O-methyl modified nucleotide
  modified_base 27: mod_base = OTHER; note = 2'-O-methyl modified nucleotide
atgtttcattttctctacctcttctaa

SEQ ID NO: 1522 - RNA, 27 nt, synthetic construct
  source 1..27: mol_type = other RNA
  modified_base 1: mod_base = OTHER; note = 2'-O-methyl modified nucleotide
  modified_base 2: mod_base = OTHER; note = 2'-O-methyl modified nucleotide
  modified_base 3: mod_base = OTHER; note = 2'-O-methyl modified nucleotide
  modified_base 4: mod_base = OTHER; note = 2'-O-methyl modified nucleotide
  modified_base 11: mod_base = OTHER; note = 2'-O-methyl modified nucleotide
  modified_base 13: mod_base = OTHER; note = 2'-O-methyl modified nucleotide
  modified_base 23: mod_base = OTHER; note = 2'-O-methyl modified nucleotide
  modified_base 25: mod_base = OTHER; note = 2'-O-methyl modified nucleotide
  modified_base 26: mod_base = OTHER; note = 2'-O-methyl modified nucleotide
  modified_base 27: mod_base = OTHER; note = 2'-O-methyl modified nucleotide
aatgttccattttctctacctcttcta

SEQ ID NO: 1523 - RNA, 27 nt, synthetic construct
  source 1..27: mol_type = other RNA
  modified_base 1: mod_base = OTHER; note = 2'-O-methyl modified nucleotide
  modified_base 2: mod_base = OTHER; note = 2'-O-methyl modified nucleotide
  modified_base 3: mod_base = OTHER; note = 2'-O-methyl modified nucleotide
  modified_base 4: mod_base = OTHER; note = 2'-O-methyl modified nucleotide
  modified_base 11: mod_base = OTHER; note = 2'-O-methyl modified nucleotide
  modified_base 13: mod_base = OTHER; note = 2'-O-methyl modified nucleotide
  modified_base 23: mod_base = OTHER; note = 2'-O-methyl modified nucleotide
  modified_base 25: mod_base = OTHER; note = 2'-O-methyl modified nucleotide
  modified_base 26: mod_base = OTHER; note = 2'-O-methyl modified nucleotide
  modified_base 27: mod_base = OTHER; note = 2'-O-methyl modified nucleotide
taatgttccattttctctacctcttct

SEQ ID NO: 1524 - RNA, 27 nt, synthetic construct
  source 1..27: mol_type = other RNA
  modified_base 1: mod_base = OTHER; note = 2'-O-methyl modified nucleotide
  modified_base 2: mod_base = OTHER; note = 2'-O-methyl modified nucleotide
  modified_base 3: mod_base = OTHER; note = 2'-O-methyl modified nucleotide
  modified_base 4: mod_base = OTHER; note = 2'-O-methyl modified nucleotide
  modified_base 11: mod_base = OTHER; note = 2'-O-methyl modified nucleotide
  modified_base 13: mod_base = OTHER; note = 2'-O-methyl modified nucleotide
  modified_base 23: mod_base = OTHER; note = 2'-O-methyl modified nucleotide
  modified_base 25: mod_base = OTHER; note = 2'-O-methyl modified nucleotide
  modified_base 26: mod_base = OTHER; note = 2'-O-methyl modified nucleotide
  modified_base 27: mod_base = OTHER; note = 2'-O-methyl modified nucleotide
ttaattttccattttctctacctcttc

SEQ ID NO: 1525 - RNA, 27 nt, synthetic construct
  source 1..27: mol_type = other RNA
  modified_base 1: mod_base = OTHER; note = 2'-O-methyl modified nucleotide
  modified_base 2: mod_base = OTHER; note = 2'-O-methyl modified nucleotide
  modified_base 3: mod_base = OTHER; note = 2'-O-methyl modified nucleotide
  modified_base 4: mod_base = OTHER; note = 2'-O-methyl modified nucleotide
  modified_base 11: mod_base = OTHER; note = 2'-O-methyl modified nucleotide
  modified_base 13: mod_base = OTHER; note = 2'-O-methyl modified nucleotide
  modified_base 23: mod_base = OTHER; note = 2'-O-methyl modified nucleotide
  modified_base 25: mod_base = OTHER; note = 2'-O-methyl modified nucleotide
  modified_base 26: mod_base = OTHER; note = 2'-O-methyl modified nucleotide
  modified_base 27: mod_base = OTHER; note = 2'-O-methyl modified nucleotide
gttaatgttccattttctctacctctt

SEQ ID NO: 1526 - RNA, 27 nt, synthetic construct
  source 1..27: mol_type = other RNA
  modified_base 1: mod_base = OTHER; note = 2'-O-methyl modified nucleotide
  modified_base 2: mod_base = OTHER; note = 2'-O-methyl modified nucleotide
  modified_base 3: mod_base = OTHER; note = 2'-O-methyl modified nucleotide
  modified_base 4: mod_base = OTHER; note = 2'-O-methyl modified nucleotide
  modified_base 11: mod_base = OTHER; note = 2'-O-methyl modified nucleotide
  modified_base 13: mod_base = OTHER; note = 2'-O-methyl modified nucleotide
  modified_base 23: mod_base = OTHER; note = 2'-O-methyl modified nucleotide
  modified_base 25: mod_base = OTHER; note = 2'-O-methyl modified nucleotide
  modified_base 26: mod_base = OTHER; note = 2'-O-methyl modified nucleotide
  modified_base 27: mod_base = OTHER; note = 2'-O-methyl modified nucleotide
ggttattgttccattttctctacctct

SEQ ID NO: 1527 - RNA, 27 nt, synthetic construct
  source 1..27: mol_type = other RNA
  modified_base 1: mod_base = OTHER; note = 2'-O-methyl modified nucleotide
  modified_base 2: mod_base = OTHER; note = 2'-O-methyl modified nucleotide
  modified_base 3: mod_base = OTHER; note = 2'-O-methyl modified nucleotide
  modified_base 4: mod_base = OTHER; note = 2'-O-methyl modified nucleotide
  modified_base 11: mod_base = OTHER; note = 2'-O-methyl modified nucleotide
  modified_base 13: mod_base = OTHER; note = 2'-O-methyl modified nucleotide
  modified_base 23: mod_base = OTHER; note = 2'-O-methyl modified nucleotide
  modified_base 25: mod_base = OTHER; note = 2'-O-methyl modified nucleotide
  modified_base 26: mod_base = OTHER; note = 2'-O-methyl modified nucleotide
  modified_base 27: mod_base = OTHER; note = 2'-O-methyl modified nucleotide
agggttaatgttccattttctctacct

SEQ ID NO: 1528 - RNA, 27 nt, synthetic construct
  source 1..27: mol_type = other RNA
  modified_base 1: mod_base = OTHER; note = 2'-O-methyl modified nucleotide
  modified_base 2: mod_base = OTHER; note = 2'-O-methyl modified nucleotide
  modified_base 3: mod_base = OTHER; note = 2'-O-methyl modified nucleotide
  modified_base 4: mod_base = OTHER; note = 2'-O-methyl modified nucleotide
  modified_base 11: mod_base = OTHER; note = 2'-O-methyl modified nucleotide
  modified_base 13: mod_base = OTHER; note = 2'-O-methyl modified nucleotide
  modified_base 23: mod_base = OTHER; note = 2'-O-methyl modified nucleotide
  modified_base 25: mod_base = OTHER; note = 2'-O-methyl modified nucleotide
  modified_base 26: mod_base = OTHER; note = 2'-O-methyl modified nucleotide
  modified_base 27: mod_base = OTHER; note = 2'-O-methyl modified nucleotide
tagggttaatgttccattttctctacc

SEQ ID NO: 1529 - RNA, 27 nt, synthetic construct
  source 1..27: mol_type = other RNA
  modified_base 1: mod_base = OTHER; note = 2'-O-methyl modified nucleotide
  modified_base 2: mod_base = OTHER; note = 2'-O-methyl modified nucleotide
  modified_base 3: mod_base = OTHER; note = 2'-O-methyl modified nucleotide
  modified_base 4: mod_base = OTHER; note = 2'-O-methyl modified nucleotide
  modified_base 11: mod_base = OTHER; note = 2'-O-methyl modified nucleotide
  modified_base 13: mod_base = OTHER; note = 2'-O-methyl modified nucleotide
  modified_base 23: mod_base = OTHER; note = 2'-O-methyl modified nucleotide
  modified_base 25: mod_base = OTHER; note = 2'-O-methyl modified nucleotide
  modified_base 26: mod_base = OTHER; note = 2'-O-methyl modified nucleotide
  modified_base 27: mod_base = OTHER; note = 2'-O-methyl modified nucleotide
gtaggtttaatgttccattttctctac

SEQ ID NO: 1530 - RNA, 27 nt, synthetic construct
  source 1..27: mol_type = other RNA
  modified_base 1: mod_base = OTHER; note = 2'-O-methyl modified nucleotide
  modified_base 2: mod_base = OTHER; note = 2'-O-methyl modified nucleotide
  modified_base 3: mod_base = OTHER; note = 2'-O-methyl modified nucleotide
  modified_base 4: mod_base = OTHER; note = 2'-O-methyl modified nucleotide
  modified_base 11: mod_base = OTHER; note = 2'-O-methyl modified nucleotide
  modified_base 13: mod_base = OTHER; note = 2'-O-methyl modified nucleotide
  modified_base 23: mod_base = OTHER; note = 2'-O-methyl modified nucleotide
  modified_base 25: mod_base = OTHER; note = 2'-O-methyl modified nucleotide
  modified_base 26: mod_base = OTHER; note = 2'-O-methyl modified nucleotide
  modified_base 27: mod_base = OTHER; note = 2'-O-methyl modified nucleotide
tgtagtgttaatgttccattttctcta

SEQ ID NO: 1531 - RNA, 27 nt, synthetic construct
  source 1..27: mol_type = other RNA
  modified_base 1: mod_base = OTHER; note = 2'-O-methyl modified nucleotide
  modified_base 2: mod_base = OTHER; note = 2'-O-methyl modified nucleotide
  modified_base 3: mod_base = OTHER; note = 2'-O-methyl modified nucleotide
  modified_base 4: mod_base = OTHER; note = 2'-O-methyl modified nucleotide
  modified_base 11: mod_base = OTHER; note = 2'-O-methyl modified nucleotide
  modified_base 13: mod_base = OTHER; note = 2'-O-methyl modified nucleotide
  modified_base 23: mod_base = OTHER; note = 2'-O-methyl modified nucleotide
  modified_base 25: mod_base = OTHER; note = 2'-O-methyl modified nucleotide
  modified_base 26: mod_base = OTHER; note = 2'-O-methyl modified nucleotide
  modified_base 27: mod_base = OTHER; note = 2'-O-methyl modified nucleotide
gtgtatggttaatgttccattttctct

SEQ ID NO: 1532 - RNA, 27 nt, synthetic construct
  source 1..27: mol_type = other RNA
  modified_base 1: mod_base = OTHER; note = 2'-O-methyl modified nucleotide
  modified_base 2: mod_base = OTHER; note = 2'-O-methyl modified nucleotide
  modified_base 3: mod_base = OTHER; note = 2'-O-methyl modified nucleotide
  modified_base 4: mod_base = OTHER; note = 2'-O-methyl modified nucleotide
  modified_base 11: mod_base = OTHER; note = 2'-O-methyl modified nucleotide
  modified_base 13: mod_base = OTHER; note = 2'-O-methyl modified nucleotide
  modified_base 23: mod_base = OTHER; note = 2'-O-methyl modified nucleotide
  modified_base 25: mod_base = OTHER; note = 2'-O-methyl modified nucleotide
  modified_base 26: mod_base = OTHER; note = 2'-O-methyl modified nucleotide
  modified_base 27: mod_base = OTHER; note = 2'-O-methyl modified nucleotide
agtgttgggttaatgttccattttctc

SEQ ID NO: 1533 - RNA, 27 nt, synthetic construct
  source 1..27: mol_type = other RNA
  modified_base 1: mod_base = OTHER; note = 2'-O-methyl modified nucleotide
  modified_base 2: mod_base = OTHER; note = 2'-O-methyl modified nucleotide
  modified_base 3: mod_base = OTHER; note = 2'-O-methyl modified nucleotide
  modified_base 4: mod_base = OTHER; note = 2'-O-methyl modified nucleotide
  modified_base 11: mod_base = OTHER; note = 2'-O-methyl modified nucleotide
  modified_base 13: mod_base = OTHER; note = 2'-O-methyl modified nucleotide
  modified_base 23: mod_base = OTHER; note = 2'-O-methyl modified nucleotide
  modified_base 25: mod_base = OTHER; note = 2'-O-methyl modified nucleotide
  modified_base 26: mod_base = OTHER; note = 2'-O-methyl modified nucleotide
  modified_base 27: mod_base = OTHER; note = 2'-O-methyl modified nucleotide
gagtgtagggttaatgttccattttct

SEQ ID NO: 1534 - RNA, 27 nt, synthetic construct
  source 1..27: mol_type = other RNA
  modified_base 1: mod_base = OTHER; note = 2'-O-methyl modified nucleotide
  modified_base 2: mod_base = OTHER; note = 2'-O-methyl modified nucleotide
  modified_base 3: mod_base = OTHER; note = 2'-O-methyl modified nucleotide
  modified_base 4: mod_base = OTHER; note = 2'-O-methyl modified nucleotide
  modified_base 11: mod_base = OTHER; note = 2'-O-methyl modified nucleotide
  modified_base 13: mod_base = OTHER; note = 2'-O-methyl modified nucleotide
  modified_base 23: mod_base = OTHER; note = 2'-O-methyl modified nucleotide
  modified_base 25: mod_base = OTHER; note = 2'-O-methyl modified nucleotide
  modified_base 26: mod_base = OTHER; note = 2'-O-methyl modified nucleotide
  modified_base 27: mod_base = OTHER; note = 2'-O-methyl modified nucleotide
tccgattgtagggttaatgttccattt

SEQ ID NO: 1535 - RNA, 27 nt, synthetic construct
  source 1..27: mol_type = other RNA
  modified_base 1: mod_base = OTHER; note = 2'-O-methyl modified nucleotide
  modified_base 2: mod_base = OTHER; note = 2'-O-methyl modified nucleotide
  modified_base 3: mod_base = OTHER; note = 2'-O-methyl modified nucleotide
  modified_base 4: mod_base = OTHER; note = 2'-O-methyl modified nucleotide
  modified_base 11: mod_base = OTHER; note = 2'-O-methyl modified nucleotide
  modified_base 13: mod_base = OTHER; note = 2'-O-methyl modified nucleotide
  modified_base 23: mod_base = OTHER; note = 2'-O-methyl modified nucleotide
  modified_base 25: mod_base = OTHER; note = 2'-O-methyl modified nucleotide
  modified_base 26: mod_base = OTHER; note = 2'-O-methyl modified nucleotide
  modified_base 27: mod_base = OTHER; note = 2'-O-methyl modified nucleotide
catactaaaacacacttctggcagtgt

SEQ ID NO: 1536 - RNA, 27 nt, synthetic construct
  source 1..27: mol_type = other RNA
  modified_base 1: mod_base = OTHER; note = 2'-O-methyl modified nucleotide
  modified_base 2: mod_base = OTHER; note = 2'-O-methyl modified nucleotide
  modified_base 3: mod_base = OTHER; note = 2'-O-methyl modified nucleotide
  modified_base 4: mod_base = OTHER; note = 2'-O-methyl modified nucleotide
  modified_base 11: mod_base = OTHER; note = 2'-O-methyl modified nucleotide
  modified_base 13: mod_base = OTHER; note = 2'-O-methyl modified nucleotide
  modified_base 23: mod_base = OTHER; note = 2'-O-methyl modified nucleotide
  modified_base 25: mod_base = OTHER; note = 2'-O-methyl modified nucleotide
  modified_base 26: mod_base = OTHER; note = 2'-O-methyl modified nucleotide
  modified_base 27: mod_base = OTHER; note = 2'-O-methyl modified nucleotide
gcatatcaaaacacacttctggcagtg

SEQ ID NO: 1537 - RNA, 36 nt, synthetic construct
  source 1..36: mol_type = other RNA
tggtgtaaaggaattcattagcagccgaaaggctgc

SEQ ID NO: 1538 - RNA, 36 nt, synthetic construct
  source 1..36: mol_type = other RNA
ggtgtaaaggaattcattaagcagccgaaaggctgc

SEQ ID NO: 1539 - RNA, 36 nt, synthetic construct
  source 1..36: mol_type = other RNA
cattagccatggatgtattagcagccgaaaggctgc

SEQ ID NO: 1540 - RNA, 36 nt, synthetic construct
  source 1..36: mol_type = other RNA
ttagccatggatgtattcaagcagccgaaaggctgc

SEQ ID NO: 1541 - RNA, 36 nt, synthetic construct
  source 1..36: mol_type = other RNA
ccatggatgtattcatgaaagcagccgaaaggctgc

SEQ ID NO: 1542 - RNA, 36 nt, synthetic construct
  source 1..36: mol_type = other RNA
atgtattcatgaaaggactagcagccgaaaggctgc

SEQ ID NO: 1543 - RNA, 36 nt, synthetic construct
  source 1..36: mol_type = other RNA
aaagacaaaagagggtgttagcagccgaaaggctgc

SEQ ID NO: 1544 - RNA, 36 nt, synthetic construct
  source 1..36: mol_type = other RNA
agagggtgttctctatgtaagcagccgaaaggctgc

SEQ ID NO: 1545 - RNA, 36 nt, synthetic construct
  source 1..36: mol_type = other RNA
aagaccaaagagcaagtgaagcagccgaaaggctgc

SEQ ID NO: 1546 - RNA, 36 nt, synthetic construct
  source 1..36: mol_type = other RNA
caaagagcaagtgacaaatagcagccgaaaggctgc

SEQ ID NO: 1547 - RNA, 36 nt, synthetic construct
  source 1..36: mol_type = other RNA
aagtgacaaatgttggaggagcagccgaaaggctgc

SEQ ID NO: 1548 - RNA, 36 nt, synthetic construct
  source 1..36: mol_type = other RNA
cgaacctgaagcctaagaaagcagccgaaaggctgc

SEQ ID NO: 1549 - RNA, 36 nt, synthetic construct
  source 1..36: mol_type = other RNA
aatatctttgctcccagttagcagccgaaaggctgc

SEQ ID NO: 1550 - RNA, 36 nt, synthetic construct
  source 1..36: mol_type = other RNA
agttccaatgtgcccagtcagcagccgaaaggctgc

SEQ ID NO: 1551 - RNA, 36 nt, synthetic construct
  source 1..36: mol_type = other RNA
cagtcatgacatttctcaaagcagccgaaaggctgc

SEQ ID NO: 1552 - RNA, 36 nt, synthetic construct
  source 1..36: mol_type = other RNA
tgacatttctcaaagttttagcagccgaaaggctgc

SEQ ID NO: 1553 - RNA, 36 nt, synthetic construct
  source 1..36: mol_type = other RNA
cagcagtgattgaagtatcagcagccgaaaggctgc

SEQ ID NO: 1554 - RNA, 36 nt, synthetic construct
  source 1..36: mol_type = other RNA
gatgtattcatgaaaggacagcagccgaaaggctgc

SEQ ID NO: 1555 - RNA, 36 nt, synthetic construct
  source 1..36: mol_type = other RNA
tgttgctgttgttcagaagagcagccgaaaggctgc

SEQ ID NO: 1556 - RNA, 36 nt, synthetic construct
  source 1..36: mol_type = other RNA
agatttttaggtgtcttttagcagccgaaaggctgc

SEQ ID NO: 1557 - RNA, 36 nt, synthetic construct
  source 1..36: mol_type = other RNA
ggtgtcttttaatgatactagcagccgaaaggctgc

SEQ ID NO: 1558 - RNA, 36 nt, synthetic construct
  source 1..36: mol_type = other RNA
tgtaaaggaattcattagcagcagccgaaaggctgc

SEQ ID NO: 1559 - RNA, 36 nt, synthetic construct
  source 1..36: mol_type = other RNA
atggatgtattcatgaaagagcagccgaaaggctgc

SEQ ID NO: 1560 - RNA, 36 nt, synthetic construct
  source 1..36: mol_type = other RNA
agagcaagtgacaaatgttagcagccgaaaggctgc

SEQ ID NO: 1561 - RNA, 36 nt, synthetic construct
  source 1..36: mol_type = other RNA
agggtatcaagactacgaaagcagccgaaaggctgc

SEQ ID NO: 1562 - RNA, 36 nt, synthetic construct
  source 1..36: mol_type = other RNA
atatctttgctcccagtttagcagccgaaaggctgc

SEQ ID NO: 1563 - RNA, 36 nt, synthetic construct
  source 1..36: mol_type = other RNA
agtgctcagttccaatgtgagcagccgaaaggctgc

SEQ ID NO: 1564 - RNA, 36 nt, synthetic construct
  source 1..36: mol_type = other RNA
agtcatgacatttctcaaaagcagccgaaaggctgc

SEQ ID NO: 1565 - RNA, 36 nt, synthetic construct
  source 1..36: mol_type = other RNA
catttctcaaagtttttacagcagccgaaaggctgc

SEQ ID NO: 1566 - RNA, 36 nt, synthetic construct
  source 1..36: mol_type = other RNA
tcagcagtgattgaagtatagcagccgaaaggctgc

SEQ ID NO: 1567 - RNA, 36 nt, synthetic construct
  source 1..36: mol_type = other RNA
gtgctgtggattttgtggcagcagccgaaaggctgc

SEQ ID NO: 1568 - RNA, 36 nt, synthetic construct
  source 1..36: mol_type = other RNA
tgctgtggattttgtggctagcagccgaaaggctgc

SEQ ID NO: 1569 - RNA, 36 nt, synthetic construct
  source 1..36: mol_type = other RNA
tgttcagaagttgttagtgagcagccgaaaggctgc

SEQ ID NO: 1570 - RNA, 36 nt, synthetic construct
  source 1..36: mol_type = other RNA
agttgttagtgatttgctaagcagccgaaaggctgc

SEQ ID NO: 1571 - RNA, 36 nt, synthetic construct
  source 1..36: mol_type = other RNA
cttttaatgatactgtctaagcagccgaaaggctgc

SEQ ID NO: 1572 - RNA, 22 nt, synthetic construct
  source 1..22: mol_type = other RNA
taatgaattcctttacaccagg

SEQ ID NO: 1573 - RNA, 22 nt, synthetic construct
  source 1..22: mol_type = other RNA
ttaatgaattcctttacaccgg

SEQ ID NO: 1574 - RNA, 22 nt, synthetic construct
  source 1..22: mol_type = other RNA
taatacatccatggctaatggg

SEQ ID NO: 1575 - RNA, 22 nt, synthetic construct
  source 1..22: mol_type = other RNA
ttgaatacatccatggctaagg

SEQ ID NO: 1576 - RNA, 22 nt, synthetic construct
  source 1..22: mol_type = other RNA
tttcatgaatacatccatgggg

SEQ ID NO: 1577 - RNA, 22 nt, synthetic construct
  source 1..22: mol_type = other RNA
tagtcctttcatgaatacatgg

SEQ ID NO: 1578 - RNA, 22 nt, synthetic construct
  source 1..22: mol_type = other RNA
taacaccctcttttgtctttgg

SEQ ID NO: 1579 - RNA, 22 nt, synthetic construct
  source 1..22: mol_type = other RNA
ttacatagagaacaccctctgg

SEQ ID NO: 1580 - RNA, 22 nt, synthetic construct
  source 1..22: mol_type = other RNA
ttcacttgctctttggtcttgg

SEQ ID NO: 1581 - RNA, 22 nt, synthetic construct
  source 1..22: mol_type = other RNA
tatttgtcacttgctctttggg

SEQ ID NO: 1582 - RNA, 22 nt, synthetic construct
  source 1..22: mol_type = other RNA
tcctccaacatttgtcacttgg

SEQ ID NO: 1583 - RNA, 22 nt, synthetic construct
  source 1..22: mol_type = other RNA
tttcttaggcttcaggttcggg

SEQ ID NO: 1584 - RNA, 22 nt, synthetic construct
  source 1..22: mol_type = other RNA
taactgggagcaaagatattgg

SEQ ID NO: 1585 - RNA, 22 nt, synthetic construct
  source 1..22: mol_type = other RNA
tgactgggcacattggaactgg

SEQ ID NO: 1586 - RNA, 22 nt, synthetic construct
  source 1..22: mol_type = other RNA
tttgagaaatgtcatgactggg

SEQ ID NO: 1587 - RNA, 22 nt, synthetic construct
  source 1..22: mol_type = other RNA
taaaactttgagaaatgtcagg

SEQ ID NO: 1588 - RNA, 22 nt, synthetic construct
  source 1..22: mol_type = other RNA
tgatacttcaatcactgctggg

SEQ ID NO: 1589 - RNA, 22 nt, synthetic construct
  source 1..22: mol_type = other RNA
tgtcctttcatgaatacatcgg

SEQ ID NO: 1590 - RNA, 22 nt, synthetic construct
  source 1..22: mol_type = other RNA
tcttctgaacaacagcaacagg

SEQ ID NO: 1591 - RNA, 22 nt, synthetic construct
  source 1..22: mol_type = other RNA
taaaagacacctaaaaatctgg

SEQ ID NO: 1592 - RNA, 22 nt, synthetic construct
  source 1..22: mol_type = other RNA
tagtatcattaaaagacaccgg

SEQ ID NO: 1593 - RNA, 22 nt, synthetic construct
  source 1..22: mol_type = other RNA
tgctaatgaattcctttacagg

SEQ ID NO: 1594 - RNA, 22 nt, synthetic construct
  source 1..22: mol_type = other RNA
tctttcatgaatacatccatgg

SEQ ID NO: 1595 - RNA, 22 nt, synthetic construct
  source 1..22: mol_type = other RNA
taacatttgtcacttgctctgg

SEQ ID NO: 1596 - RNA, 22 nt, synthetic construct
  source 1..22: mol_type = other RNA
tttcgtagtcttgataccctgg

SEQ ID NO: 1597 - RNA, 22 nt, synthetic construct
  source 1..22: mol_type = other RNA
taaactgggagcaaagatatgg

SEQ ID NO: 1598 - RNA, 22 nt, synthetic construct
  source 1..22: mol_type = other RNA
tcacattggaactgagcactgg

SEQ ID NO: 1599 - RNA, 22 nt, synthetic construct
  source 1..22: mol_type = other RNA
ttttgagaaatgtcatgactgg

SEQ ID NO: 1600 - RNA, 22 nt, synthetic construct
  source 1..22: mol_type = other RNA
tgtaaaaactttgagaaatggg

SEQ ID NO: 1601 - RNA, 22 nt, synthetic construct
  source 1..22: mol_type = other RNA
tatacttcaatcactgctgagg

SEQ ID NO: 1602 - RNA, 22 nt, synthetic construct
  source 1..22: mol_type = other RNA
tgccacaaaatccacagcacgg

SEQ ID NO: 1603 - RNA, 22 nt, synthetic construct
  source 1..22: mol_type = other RNA
tagccacaaaatccacagcagg

SEQ ID NO: 1604 - RNA, 22 nt, synthetic construct
  source 1..22: mol_type = other RNA
tcactaacaacttctgaacagg

SEQ ID NO: 1605 - RNA, 22 nt, synthetic construct
  source 1..22: mol_type = other RNA
ttagcaaatcactaacaactgg

SEQ ID NO: 1606 - RNA, 22 nt, synthetic construct
  source 1..22: mol_type = other RNA
ttagacagtatcattaaaaggg

SEQ ID NO: 1607 - RNA, 36 nt, synthetic construct; identical to SEQ ID NO: 1537
  source 1..36: mol_type = other RNA
  modified_base 1: mod_base = OTHER; note = 2'-O-methyl modified nucleotide with phosphorothioate linkage
  modified_base 2: mod_base = OTHER; note = 2'-O-methyl modified nucleotide
  modified_base 3: mod_base = OTHER; note = 2'-fluoro modified nucleotide
  modified_base 4: mod_base = OTHER; note = 2'-O-methyl modified nucleotide
  modified_base 5: mod_base = OTHER; note = 2'-fluoro modified nucleotide
  modified_base 6: mod_base = OTHER; note = 2'-O-methyl modified nucleotide
  modified_base 7: mod_base = OTHER; note = 2'-O-methyl modified nucleotide
  modified_base 8: mod_base = OTHER; note = 2'-fluoro modified nucleotide
  modified_base 9: mod_base = OTHER; note = 2'-O-methyl modified nucleotide
  modified_base 10: mod_base = OTHER; note = 2'-fluoro modified nucleotide
  modified_base 11: mod_base = OTHER; note = 2'-O-methyl modified nucleotide
  modified_base 12: mod_base = OTHER; note = 2'-fluoro modified nucleotide
  modified_base 13: mod_base = OTHER; note = 2'-fluoro modified nucleotide
  modified_base 14: mod_base = OTHER; note = 2'-O-methyl modified nucleotide
  modified_base 15: mod_base = OTHER; note = 2'-fluoro modified nucleotide
  modified_base 16: mod_base = OTHER; note = 2'-O-methyl modified nucleotide
  modified_base 17: mod_base = OTHER; note = 2'-fluoro modified nucleotide
  modified_base 18: mod_base = OTHER; note = 2'-O-methyl modified nucleotide
  modified_base 19: mod_base = OTHER; note = 2'-O-methyl modified nucleotide
  modified_base 20: mod_base = OTHER; note = 2'-O-methyl modified nucleotide
  modified_base 21: mod_base = OTHER; note = 2'-O-methyl modified nucleotide
  modified_base 22: mod_base = OTHER; note = 2'-O-methyl modified nucleotide
  modified_base 23: mod_base = OTHER; note = 2'-O-methyl modified nucleotide
  modified_base 24: mod_base = OTHER; note = 2'-O-methyl modified nucleotide
  modified_base 25: mod_base = OTHER; note = 2'-O-methyl modified nucleotide
  modified_base 26: mod_base = OTHER; note = 2'-O-methyl modified nucleotide
  modified_base 27: mod_base = OTHER; note = 2'-O-methyl modified nucleotide
  modified_base 28: mod_base = OTHER; note 2'-aminodiethoxymethanol-Adenine-N-Acetylgalactosamine
  modified_base 29: mod_base = OTHER; note 2'-aminodiethoxymethanol-Adenine-N-Acetylgalactosamine
  modified_base 30: mod_base = OTHER; note 2'-aminodiethoxymethanol-Adenine-N-Acetylgalactosamine
  modified_base 31: mod_base = OTHER; note = 2'-O-methyl modified nucleotide
  modified_base 32: mod_base = OTHER; note = 2'-O-methyl modified nucleotide
  modified_base 33: mod_base = OTHER; note = 2'-O-methyl modified nucleotide
  modified_base 34: mod_base = OTHER; note = 2'-O-methyl modified nucleotide
  modified_base 35: mod_base = OTHER; note = 2'-O-methyl modified nucleotide
  modified_base 36: mod_base = OTHER; note = 2'-O-methyl modified nucleotide

SEQ ID NO: 1608 - RNA, 36 nt, synthetic construct; identical to SEQ ID NO: 1538
  source 1..36: mol_type = other RNA
  modified_base 1: mod_base = OTHER; note = 2'-O-methyl modified nucleotide with phosphorothioate linkage
  modified_base 2: mod_base = OTHER; note = 2'-O-methyl modified nucleotide
  modified_base 3: mod_base = OTHER; note = 2'-fluoro modified nucleotide
  modified_base 4: mod_base = OTHER; note = 2'-O-methyl modified nucleotide
  modified_base 5: mod_base = OTHER; note = 2'-fluoro modified nucleotide
  modified_base 6: mod_base = OTHER; note = 2'-O-methyl modified nucleotide
  modified_base 7: mod_base = OTHER; note = 2'-O-methyl modified nucleotide
  modified_base 8: mod_base = OTHER; note = 2'-fluoro modified nucleotide
  modified_base 9: mod_base = OTHER; note = 2'-O-methyl modified nucleotide
  modified_base 10: mod_base = OTHER; note = 2'-fluoro modified nucleotide
  modified_base 11: mod_base = OTHER; note = 2'-O-methyl modified nucleotide
  modified_base 12: mod_base = OTHER; note = 2'-fluoro modified nucleotide
  modified_base 13: mod_base = OTHER; note = 2'-fluoro modified nucleotide
  modified_base 14: mod_base = OTHER; note = 2'-O-methyl modified nucleotide
  modified_base 15: mod_base = OTHER; note = 2'-fluoro modified nucleotide
  modified_base 16: mod_base = OTHER; note = 2'-O-methyl modified nucleotide
  modified_base 17: mod_base = OTHER; note = 2'-fluoro modified nucleotide
  modified_base 18: mod_base = OTHER; note = 2'-O-methyl modified nucleotide
  modified_base 19: mod_base = OTHER; note = 2'-O-methyl modified nucleotide
  modified_base 20: mod_base = OTHER; note = 2'-O-methyl modified nucleotide
  modified_base 21: mod_base = OTHER; note = 2'-O-methyl modified nucleotide
  modified_base 22: mod_base = OTHER; note = 2'-O-methyl modified nucleotide
  modified_base 23: mod_base = OTHER; note = 2'-O-methyl modified nucleotide
  modified_base 24: mod_base = OTHER; note = 2'-O-methyl modified nucleotide
  modified_base 25: mod_base = OTHER; note = 2'-O-methyl modified nucleotide
  modified_base 26: mod_base = OTHER; note = 2'-O-methyl modified nucleotide
  modified_base 27: mod_base = OTHER; note = 2'-O-methyl modified nucleotide
  modified_base 28: mod_base = OTHER; note 2'-aminodiethoxymethanol-Adenine-N-Acetylgalactosamine
  modified_base 29: mod_base = OTHER; note 2'-aminodiethoxymethanol-Adenine-N-Acetylgalactosamine
  modified_base 30: mod_base = OTHER; note 2'-aminodiethoxymethanol-Adenine-N-Acetylgalactosamine
  modified_base 31: mod_base = OTHER; note = 2'-O-methyl modified nucleotide
  modified_base 32: mod_base = OTHER; note = 2'-O-methyl modified nucleotide
  modified_base 33: mod_base = OTHER; note = 2'-O-methyl modified nucleotide
  modified_base 34: mod_base = OTHER; note = 2'-O-methyl modified nucleotide
  modified_base 35: mod_base = OTHER; note = 2'-O-methyl modified nucleotide
  modified_base 36: mod_base = OTHER; note = 2'-O-methyl modified nucleotide

SEQ ID NO: 1609 - RNA, 36 nt, synthetic construct; identical to SEQ ID NO: 1539
  source 1..36: mol_type = other RNA
  modified_base 1: mod_base = OTHER; note = 2'-O-methyl modified nucleotide with phosphorothioate linkage
  modified_base 2: mod_base = OTHER; note = 2'-O-methyl modified nucleotide
  modified_base 3: mod_base = OTHER; note = 2'-fluoro modified nucleotide
  modified_base 4: mod_base = OTHER; note = 2'-O-methyl modified nucleotide
  modified_base 5: mod_base = OTHER; note = 2'-fluoro modified nucleotide
  modified_base 6: mod_base = OTHER; note = 2'-O-methyl modified nucleotide
  modified_base 7: mod_base = OTHER; note = 2'-O-methyl modified nucleotide
  modified_base 8: mod_base = OTHER; note = 2'-fluoro modified nucleotide
  modified_base 9: mod_base = OTHER; note = 2'-O-methyl modified nucleotide
  modified_base 10: mod_base = OTHER; note = 2'-fluoro modified nucleotide
  modified_base 11: mod_base = OTHER; note = 2'-O-methyl modified nucleotide
  modified_base 12: mod_base = OTHER; note = 2'-fluoro modified nucleotide
  modified_base 13: mod_base = OTHER; note = 2'-fluoro modified nucleotide
  modified_base 14: mod_base = OTHER; note = 2'-O-methyl modified nucleotide
  modified_base 15: mod_base = OTHER; note = 2'-fluoro modified nucleotide
  modified_base 16: mod_base = OTHER; note = 2'-O-methyl modified nucleotide
  modified_base 17: mod_base = OTHER; note = 2'-fluoro modified nucleotide
  modified_base 18: mod_base = OTHER; note = 2'-O-methyl modified nucleotide
  modified_base 19: mod_base = OTHER; note = 2'-O-methyl modified nucleotide
  modified_base 20: mod_base = OTHER; note = 2'-O-methyl modified nucleotide
  modified_base 21: mod_base = OTHER; note = 2'-O-methyl modified nucleotide
  modified_base 22: mod_base = OTHER; note = 2'-O-methyl modified nucleotide
  modified_base 23: mod_base = OTHER; note = 2'-O-methyl modified nucleotide
  modified_base 24: mod_base = OTHER; note = 2'-O-methyl modified nucleotide
  modified_base 25: mod_base = OTHER; note = 2'-O-methyl modified nucleotide
  modified_base 26: mod_base = OTHER; note = 2'-O-methyl modified nucleotide
  modified_base 27: mod_base = OTHER; note = 2'-O-methyl modified nucleotide
  modified_base 28: mod_base = OTHER; note 2'-aminodiethoxymethanol-Adenine-N-Acetylgalactosamine
  modified_base 29: mod_base = OTHER; note 2'-aminodiethoxymethanol-Adenine-N-Acetylgalactosamine
  modified_base 30: mod_base = OTHER; note 2'-aminodiethoxymethanol-Adenine-N-Acetylgalactosamine
  modified_base 31: mod_base = OTHER; note = 2'-O-methyl modified nucleotide
  modified_base 32: mod_base = OTHER; note = 2'-O-methyl modified nucleotide
  modified_base 33: mod_base = OTHER; note = 2'-O-methyl modified nucleotide
  modified_base 34: mod_base = OTHER; note = 2'-O-methyl modified nucleotide
  modified_base 35: mod_base = OTHER; note = 2'-O-methyl modified nucleotide
  modified_base 36: mod_base = OTHER; note = 2'-O-methyl modified nucleotide

SEQ ID NO: 1610 - RNA, 36 nt, synthetic construct; identical to SEQ ID NO: 1540
  source 1..36: mol_type = other RNA
  modified_base 1: mod_base = OTHER; note = 2'-O-methyl modified nucleotide with phosphorothioate linkage
  modified_base 2: mod_base = OTHER; note = 2'-O-methyl modified nucleotide
  modified_base 3: mod_base = OTHER; note = 2'-fluoro modified nucleotide
  modified_base 4: mod_base = OTHER; note = 2'-O-methyl modified nucleotide
  modified_base 5: mod_base = OTHER; note = 2'-fluoro modified nucleotide
  modified_base 6: mod_base = OTHER; note = 2'-O-methyl modified nucleotide
  modified_base 7: mod_base = OTHER; note = 2'-O-methyl modified nucleotide
  modified_base 8: mod_base = OTHER; note = 2'-fluoro modified nucleotide
  modified_base 9: mod_base = OTHER; note = 2'-O-methyl modified nucleotide
  modified_base 10: mod_base = OTHER; note = 2'-fluoro modified nucleotide
  modified_base 11: mod_base = OTHER; note = 2'-O-methyl modified nucleotide
  modified_base 12: mod_base = OTHER; note = 2'-fluoro modified nucleotide
  modified_base 13: mod_base = OTHER; note = 2'-fluoro modified nucleotide
  modified_base 14: mod_base = OTHER; note = 2'-O-methyl modified nucleotide
  modified_base 15: mod_base = OTHER; note = 2'-fluoro modified nucleotide
  modified_base 16: mod_base = OTHER; note = 2'-O-methyl modified nucleotide
  modified_base 17: mod_base = OTHER; note = 2'-fluoro modified nucleotide
  modified_base 18: mod_base = OTHER; note = 2'-O-methyl modified nucleotide
  modified_base 19: mod_base = OTHER; note = 2'-O-methyl modified nucleotide
  modified_base 20: mod_base = OTHER; note = 2'-O-methyl modified nucleotide
  modified_base 21: mod_base = OTHER; note = 2'-O-methyl modified nucleotide
  modified_base 22: mod_base = OTHER; note = 2'-O-methyl modified nucleotide
  modified_base 23: mod_base = OTHER; note = 2'-O-methyl modified nucleotide
  modified_base 24: mod_base = OTHER; note = 2'-O-methyl modified nucleotide
  modified_base 25: mod_base = OTHER; note = 2'-O-methyl modified nucleotide
  modified_base 26: mod_base = OTHER; note = 2'-O-methyl modified nucleotide
  modified_base 27: mod_base = OTHER; note = 2'-O-methyl modified nucleotide
  modified_base 28: mod_base = OTHER; note 2'-aminodiethoxymethanol-Adenine-N-Acetylgalactosamine
  modified_base 29: mod_base = OTHER; note 2'-aminodiethoxymethanol-Adenine-N-Acetylgalactosamine
  modified_base 30: mod_base = OTHER; note 2'-aminodiethoxymethanol-Adenine-N-Acetylgalactosamine
  modified_base 31: mod_base = OTHER; note = 2'-O-methyl modified nucleotide
  modified_base 32: mod_base = OTHER; note = 2'-O-methyl modified nucleotide
  modified_base 33: mod_base = OTHER; note = 2'-O-methyl modified nucleotide
  modified_base 34: mod_base = OTHER; note = 2'-O-methyl modified nucleotide
  modified_base 35: mod_base = OTHER; note = 2'-O-methyl modified nucleotide
  modified_base 36: mod_base = OTHER; note = 2'-O-methyl modified nucleotide

SEQ ID NO: 1611 - RNA, 36 nt, synthetic construct; identical to SEQ ID NO: 1541
  source 1..36: mol_type = other RNA
  modified_base 1: mod_base = OTHER; note = 2'-O-methyl modified nucleotide with phosphorothioate linkage
  modified_base 2: mod_base = OTHER; note = 2'-O-methyl modified nucleotide
  modified_base 3: mod_base = OTHER; note = 2'-fluoro modified nucleotide
  modified_base 4: mod_base = OTHER; note = 2'-O-methyl modified nucleotide
  modified_base 5: mod_base = OTHER; note = 2'-fluoro modified nucleotide
  modified_base 6: mod_base = OTHER; note = 2'-O-methyl modified nucleotide
  modified_base 7: mod_base = OTHER; note = 2'-O-methyl modified nucleotide
  modified_base 8: mod_base = OTHER; note = 2'-fluoro modified nucleotide
  modified_base 9: mod_base = OTHER; note = 2'-O-methyl modified nucleotide
  modified_base 10: mod_base = OTHER; note = 2'-fluoro modified nucleotide
  modified_base 11: mod_base = OTHER; note = 2'-O-methyl modified nucleotide
  modified_base 12: mod_base = OTHER; note = 2'-fluoro modified nucleotide
  modified_base 13: mod_base = OTHER; note = 2'-fluoro modified nucleotide
  modified_base 14: mod_base = OTHER; note = 2'-O-methyl modified nucleotide
  modified_base 15: mod_base = OTHER; note = 2'-fluoro modified nucleotide
  modified_base 16: mod_base = OTHER; note = 2'-O-methyl modified nucleotide
  modified_base 17: mod_base = OTHER; note = 2'-fluoro modified nucleotide
  modified_base 18: mod_base = OTHER; note = 2'-O-methyl modified nucleotide
  modified_base 19: mod_base = OTHER; note = 2'-O-methyl modified nucleotide
  modified_base 20: mod_base = OTHER; note = 2'-O-methyl modified nucleotide
  modified_base 21: mod_base = OTHER; note = 2'-O-methyl modified nucleotide
  modified_base 22: mod_base = OTHER; note = 2'-O-methyl modified nucleotide
  modified_base 23: mod_base = OTHER; note = 2'-O-methyl modified nucleotide
  modified_base 24: mod_base = OTHER; note = 2'-O-methyl modified nucleotide
  modified_base 25: mod_base = OTHER; note = 2'-O-methyl modified nucleotide
  modified_base 26: mod_base = OTHER; note = 2'-O-methyl modified nucleotide
  modified_base 27: mod_base = OTHER; note = 2'-O-methyl modified nucleotide
  modified_base 28: mod_base = OTHER; note 2'-aminodiethoxymethanol-Adenine-N-Acetylgalactosamine
  modified_base 29: mod_base = OTHER; note 2'-aminodiethoxymethanol-Adenine-N-Acetylgalactosamine
  modified_base 30: mod_base = OTHER; note 2'-aminodiethoxymethanol-Adenine-N-Acetylgalactosamine
  modified_base 31: mod_base = OTHER; note = 2'-O-methyl modified nucleotide
  modified_base 32: mod_base = OTHER; note = 2'-O-methyl modified nucleotide
  modified_base 33: mod_base = OTHER; note = 2'-O-methyl modified nucleotide
  modified_base 34: mod_base = OTHER; note = 2'-O-methyl modified nucleotide
  modified_base 35: mod_base = OTHER; note = 2'-O-methyl modified nucleotide
  modified_base 36: mod_base = OTHER; note = 2'-O-methyl modified nucleotide

SEQ ID NO: 1612 - RNA, 36 nt, synthetic construct; identical to SEQ ID NO: 1542
  source 1..36: mol_type = other RNA
  modified_base 1: mod_base = OTHER; note = 2'-O-methyl modified nucleotide with phosphorothioate linkage
  modified_base 2: mod_base = OTHER; note = 2'-O-methyl modified nucleotide
  modified_base 3: mod_base = OTHER; note = 2'-fluoro modified nucleotide
  modified_base 4: mod_base = OTHER; note = 2'-O-methyl modified nucleotide
  modified_base 5: mod_base = OTHER; note = 2'-fluoro modified nucleotide
  modified_base 6: mod_base = OTHER; note = 2'-O-methyl modified nucleotide
  modified_base 7: mod_base = OTHER; note = 2'-O-methyl modified nucleotide
  modified_base 8: mod_base = OTHER; note = 2'-fluoro modified nucleotide
  modified_base 9: mod_base = OTHER; note = 2'-O-methyl modified nucleotide
  modified_base 10: mod_base = OTHER; note = 2'-fluoro modified nucleotide
  modified_base 11: mod_base = OTHER; note = 2'-O-methyl modified nucleotide
  modified_base 12: mod_base = OTHER; note = 2'-fluoro modified nucleotide
  modified_base 13: mod_base = OTHER; note = 2'-fluoro modified nucleotide
  modified_base 14: mod_base = OTHER; note = 2'-O-methyl modified nucleotide
  modified_base 15: mod_base = OTHER; note = 2'-fluoro modified nucleotide
  modified_base 16: mod_base = OTHER; note = 2'-O-methyl modified nucleotide
  modified_base 17: mod_base = OTHER; note = 2'-fluoro modified nucleotide
  modified_base 18: mod_base = OTHER; note = 2'-O-methyl modified nucleotide
  modified_base 19: mod_base = OTHER; note = 2'-O-methyl modified nucleotide
  modified_base 20: mod_base = OTHER; note = 2'-O-methyl modified nucleotide
  modified_base 21: mod_base = OTHER; note = 2'-O-methyl modified nucleotide
  modified_base 22: mod_base = OTHER; note = 2'-O-methyl modified nucleotide
  modified_base 23: mod_base = OTHER; note = 2'-O-methyl modified nucleotide
  modified_base 24: mod_base = OTHER; note = 2'-O-methyl modified nucleotide
  modified_base 25: mod_base = OTHER; note = 2'-O-methyl modified nucleotide
  modified_base 26: mod_base = OTHER; note = 2'-O-methyl modified nucleotide
  modified_base 27: mod_base = OTHER; note = 2'-O-methyl modified nucleotide
  modified_base 28: mod_base = OTHER; note 2'-aminodiethoxymethanol-Adenine-N-Acetylgalactosamine
  modified_base 29: mod_base = OTHER; note 2'-aminodiethoxymethanol-Adenine-N-Acetylgalactosamine
  modified_base 30: mod_base = OTHER; note 2'-aminodiethoxymethanol-Adenine-N-Acetylgalactosamine
  modified_base 31: mod_base = OTHER; note = 2'-O-methyl modified nucleotide
  modified_base 32: mod_base = OTHER; note = 2'-O-methyl modified nucleotide
  modified_base 33: mod_base = OTHER; note = 2'-O-methyl modified nucleotide
  modified_base 34: mod_base = OTHER; note = 2'-O-methyl modified nucleotide
  modified_base 35: mod_base = OTHER; note = 2'-O-methyl modified nucleotide
  modified_base 36: mod_base = OTHER; note = 2'-O-methyl modified nucleotide

SEQ ID NO: 1613 - RNA, 36 nt, synthetic construct; identical to SEQ ID NO: 1543
  source 1..36: mol_type = other RNA
  modified_base 1: mod_base = OTHER; note = 2'-O-methyl modified nucleotide with phosphorothioate linkage
  modified_base 2: mod_base = OTHER; note = 2'-O-methyl modified nucleotide
  modified_base 3: mod_base = OTHER; note = 2'-fluoro modified nucleotide
  modified_base 4: mod_base = OTHER; note = 2'-O-methyl modified nucleotide
  modified_base 5: mod_base = OTHER; note = 2'-fluoro modified nucleotide
  modified_base 6: mod_base = OTHER; note = 2'-O-methyl modified nucleotide
  modified_base 7: mod_base = OTHER; note = 2'-O-methyl modified nucleotide
  modified_base 8: mod_base = OTHER; note = 2'-fluoro modified nucleotide
  modified_base 9: mod_base = OTHER; note = 2'-O-methyl modified nucleotide
  modified_base 10: mod_base = OTHER; note = 2'-fluoro modified nucleotide
  modified_base 11: mod_base = OTHER; note = 2'-O-methyl modified nucleotide
  modified_base 12: mod_base = OTHER; note = 2'-fluoro modified nucleotide
  modified_base 13: mod_base = OTHER; note = 2'-fluoro modified nucleotide
  modified_base 14: mod_base = OTHER; note = 2'-O-methyl modified nucleotide
  modified_base 15: mod_base = OTHER; note = 2'-fluoro modified nucleotide
  modified_base 16: mod_base = OTHER; note = 2'-O-methyl modified nucleotide
  modified_base 17: mod_base = OTHER; note = 2'-fluoro modified nucleotide
  modified_base 18: mod_base = OTHER; note = 2'-O-methyl modified nucleotide
  modified_base 19: mod_base = OTHER; note = 2'-O-methyl modified nucleotide
  modified_base 20: mod_base = OTHER; note = 2'-O-methyl modified nucleotide
  modified_base 21: mod_base = OTHER; note = 2'-O-methyl modified nucleotide
  modified_base 22: mod_base = OTHER; note = 2'-O-methyl modified nucleotide
  modified_base 23: mod_base = OTHER; note = 2'-O-methyl modified nucleotide
  modified_base 24: mod_base = OTHER; note = 2'-O-methyl modified nucleotide
  modified_base 25: mod_base = OTHER; note = 2'-O-methyl modified nucleotide
  modified_base 26: mod_base = OTHER; note = 2'-O-methyl modified nucleotide
  modified_base 27: mod_base = OTHER; note = 2'-O-methyl modified nucleotide
  modified_base 28: mod_base = OTHER; note 2'-aminodiethoxymethanol-Adenine-N-Acetylgalactosamine
  modified_base 29: mod_base = OTHER; note 2'-aminodiethoxymethanol-Adenine-N-Acetylgalactosamine
  modified_base 30: mod_base = OTHER; note 2'-aminodiethoxymethanol-Adenine-N-Acetylgalactosamine
  modified_base 31: mod_base = OTHER; note = 2'-O-methyl modified nucleotide
  modified_base 32: mod_base = OTHER; note = 2'-O-methyl modified nucleotide
  modified_base 33: mod_base = OTHER; note = 2'-O-methyl modified nucleotide
  modified_base 34: mod_base = OTHER; note = 2'-O-methyl modified nucleotide
  modified_base 35: mod_base = OTHER; note = 2'-O-methyl modified nucleotide
  modified_base 36: mod_base = OTHER; note = 2'-O-methyl modified nucleotide

SEQ ID NO: 1614 - RNA, 36 nt, synthetic construct; identical to SEQ ID NO: 1544
  source 1..36: mol_type = other RNA
  modified_base 1: mod_base = OTHER; note = 2'-O-methyl modified nucleotide with phosphorothioate linkage
  modified_base 2: mod_base = OTHER; note = 2'-O-methyl modified nucleotide
  modified_base 3: mod_base = OTHER; note = 2'-fluoro modified nucleotide
  modified_base 4: mod_base = OTHER; note = 2'-O-methyl modified nucleotide
  modified_base 5: mod_base = OTHER; note = 2'-fluoro modified nucleotide
  modified_base 6: mod_base = OTHER; note = 2'-O-methyl modified nucleotide
  modified_base 7: mod_base = OTHER; note = 2'-O-methyl modified nucleotide
  modified_base 8: mod_base = OTHER; note = 2'-fluoro modified nucleotide
  modified_base 9: mod_base = OTHER; note = 2'-O-methyl modified nucleotide
  modified_base 10: mod_base = OTHER; note = 2'-fluoro modified nucleotide
  modified_base 11: mod_base = OTHER; note = 2'-O-methyl modified nucleotide
  modified_base 12: mod_base = OTHER; note = 2'-fluoro modified nucleotide
  modified_base 13: mod_base = OTHER; note = 2'-fluoro modified nucleotide
  modified_base 14: mod_base = OTHER; note = 2'-O-methyl modified nucleotide
  modified_base 15: mod_base = OTHER; note = 2'-fluoro modified nucleotide
  modified_base 16: mod_base = OTHER; note = 2'-O-methyl modified nucleotide
  modified_base 17: mod_base = OTHER; note = 2'-fluoro modified nucleotide
  modified_base 18: mod_base = OTHER; note = 2'-O-methyl modified nucleotide
  modified_base 19: mod_base = OTHER; note = 2'-O-methyl modified nucleotide
  modified_base 20: mod_base = OTHER; note = 2'-O-methyl modified nucleotide
  modified_base 21: mod_base = OTHER; note = 2'-O-methyl modified nucleotide
  modified_base 22: mod_base = OTHER; note = 2'-O-methyl modified nucleotide
  modified_base 23: mod_base = OTHER; note = 2'-O-methyl modified nucleotide
  modified_base 24: mod_base = OTHER; note = 2'-O-methyl modified nucleotide
  modified_base 25: mod_base = OTHER; note = 2'-O-methyl modified nucleotide
  modified_base 26: mod_base = OTHER; note = 2'-O-methyl modified nucleotide
  modified_base 27: mod_base = OTHER; note = 2'-O-methyl modified nucleotide
  modified_base 28: mod_base = OTHER; note 2'-aminodiethoxymethanol-Adenine-N-Acetylgalactosamine
  modified_base 29: mod_base = OTHER; note 2'-aminodiethoxymethanol-Adenine-N-Acetylgalactosamine
  modified_base 30: mod_base = OTHER; note 2'-aminodiethoxymethanol-Adenine-N-Acetylgalactosamine
  modified_base 31: mod_base = OTHER; note = 2'-O-methyl modified nucleotide
  modified_base 32: mod_base = OTHER; note = 2'-O-methyl modified nucleotide
  modified_base 33: mod_base = OTHER; note = 2'-O-methyl modified nucleotide
  modified_base 34: mod_base = OTHER; note = 2'-O-methyl modified nucleotide
  modified_base 35: mod_base = OTHER; note = 2'-O-methyl modified nucleotide
  modified_base 36: mod_base = OTHER; note = 2'-O-methyl modified nucleotide

SEQ ID NO: 1615 - RNA, 36 nt, synthetic construct; identical to SEQ ID NO: 1545
  source 1..36: mol_type = other RNA
  modified_base 1: mod_base = OTHER; note = 2'-O-methyl modified nucleotide with phosphorothioate linkage
  modified_base 2: mod_base = OTHER; note = 2'-O-methyl modified nucleotide
  modified_base 3: mod_base = OTHER; note = 2'-fluoro modified nucleotide
  modified_base 4: mod_base = OTHER; note = 2'-O-methyl modified nucleotide
  modified_base 5: mod_base = OTHER; note = 2'-fluoro modified nucleotide
  modified_base 6: mod_base = OTHER; note = 2'-O-methyl modified nucleotide
  modified_base 7: mod_base = OTHER; note = 2'-O-methyl modified nucleotide
  modified_base 8: mod_base = OTHER; note = 2'-fluoro modified nucleotide
  modified_base 9: mod_base = OTHER; note = 2'-O-methyl modified nucleotide
  modified_base 10: mod_base = OTHER; note = 2'-fluoro modified nucleotide
  modified_base 11: mod_base = OTHER; note = 2'-O-methyl modified nucleotide
  modified_base 12: mod_base = OTHER; note = 2'-fluoro modified nucleotide
  modified_base 13: mod_base = OTHER; note = 2'-fluoro modified nucleotide
  modified_base 14: mod_base = OTHER; note = 2'-O-methyl modified nucleotide
  modified_base 15: mod_base = OTHER; note = 2'-fluoro modified nucleotide
  modified_base 16: mod_base = OTHER; note = 2'-O-methyl modified nucleotide
  modified_base 17: mod_base = OTHER; note = 2'-fluoro modified nucleotide
  modified_base 18: mod_base = OTHER; note = 2'-O-methyl modified nucleotide
  modified_base 19: mod_base = OTHER; note = 2'-O-methyl modified nucleotide
  modified_base 20: mod_base = OTHER; note = 2'-O-methyl modified nucleotide
  modified_base 21: mod_base = OTHER; note = 2'-O-methyl modified nucleotide
  modified_base 22: mod_base = OTHER; note = 2'-O-methyl modified nucleotide
  modified_base 23: mod_base = OTHER; note = 2'-O-methyl modified nucleotide
  modified_base 24: mod_base = OTHER; note = 2'-O-methyl modified nucleotide
  modified_base 25: mod_base = OTHER; note = 2'-O-methyl modified nucleotide
  modified_base 26: mod_base = OTHER; note = 2'-O-methyl modified nucleotide
  modified_base 27: mod_base = OTHER; note = 2'-O-methyl modified nucleotide
  modified_base 28: mod_base = OTHER; note 2'-aminodiethoxymethanol-Adenine-N-Acetylgalactosamine
  modified_base 29: mod_base = OTHER; note 2'-aminodiethoxymethanol-Adenine-N-Acetylgalactosamine
  modified_base 30: mod_base = OTHER; note 2'-aminodiethoxymethanol-Adenine-N-Acetylgalactosamine
  modified_base 31: mod_base = OTHER; note = 2'-O-methyl modified nucleotide
  modified_base 32: mod_base = OTHER; note = 2'-O-methyl modified nucleotide
  modified_base 33: mod_base = OTHER; note = 2'-O-methyl modified nucleotide
  modified_base 34: mod_base = OTHER; note = 2'-O-methyl modified nucleotide
  modified_base 35: mod_base = OTHER; note = 2'-O-methyl modified nucleotide
  modified_base 36: mod_base = OTHER; note = 2'-O-methyl modified nucleotide

SEQ ID NO: 1616 - RNA, 36 nt, synthetic construct; identical to SEQ ID NO: 1546
  source 1..36: mol_type = other RNA
  modified_base 1: mod_base = OTHER; note = 2'-O-methyl modified nucleotide with phosphorothioate linkage
  modified_base 2: mod_base = OTHER; note = 2'-O-methyl modified nucleotide
  modified_base 3: mod_base = OTHER; note = 2'-fluoro modified nucleotide
  modified_base 4: mod_base = OTHER; note = 2'-O-methyl modified nucleotide
  modified_base 5: mod_base = OTHER; note = 2'-fluoro modified nucleotide
  modified_base 6: mod_base = OTHER; note = 2'-O-methyl modified nucleotide
  modified_base 7: mod_base = OTHER; note = 2'-O-methyl modified nucleotide
  modified_base 8: mod_base = OTHER; note = 2'-fluoro modified nucleotide
  modified_base 9: mod_base = OTHER; note = 2'-O-methyl modified nucleotide
  modified_base 10: mod_base = OTHER; note = 2'-fluoro modified nucleotide
  modified_base 11: mod_base = OTHER; note = 2'-O-methyl modified nucleotide
  modified_base 12: mod_base = OTHER; note = 2'-fluoro modified nucleotide
  modified_base 13: mod_base = OTHER; note = 2'-fluoro modified nucleotide
  modified_base 14: mod_base = OTHER; note = 2'-O-methyl modified nucleotide
  modified_base 15: mod_base = OTHER; note = 2'-fluoro modified nucleotide
  modified_base 16: mod_base = OTHER; note = 2'-O-methyl modified nucleotide
  modified_base 17: mod_base = OTHER; note = 2'-fluoro modified nucleotide
  modified_base 18: mod_base = OTHER; note = 2'-O-methyl modified nucleotide
  modified_base 19: mod_base = OTHER; note = 2'-O-methyl modified nucleotide
  modified_base 20: mod_base = OTHER; note = 2'-O-methyl modified nucleotide
  modified_base 21: mod_base = OTHER; note = 2'-O-methyl modified nucleotide
  modified_base 22: mod_base = OTHER; note = 2'-O-methyl modified nucleotide
  modified_base 23: mod_base = OTHER; note = 2'-O-methyl modified nucleotide
  modified_base 24: mod_base = OTHER; note = 2'-O-methyl modified nucleotide
  modified_base 25: mod_base = OTHER; note = 2'-O-methyl modified nucleotide
  modified_base 26: mod_base = OTHER; note = 2'-O-methyl modified nucleotide
  modified_base 27: mod_base = OTHER; note = 2'-O-methyl modified nucleotide
  modified_base 28: mod_base = OTHER; note 2'-aminodiethoxymethanol-Adenine-N-Acetylgalactosamine
  modified_base 29: mod_base = OTHER; note 2'-aminodiethoxymethanol-Adenine-N-Acetylgalactosamine
  modified_base 30: mod_base = OTHER; note 2'-aminodiethoxymethanol-Adenine-N-Acetylgalactosamine
  modified_base 31: mod_base = OTHER; note = 2'-O-methyl modified nucleotide
  modified_base 32: mod_base = OTHER; note = 2'-O-methyl modified nucleotide
  modified_base 33: mod_base = OTHER; note = 2'-O-methyl modified nucleotide
  modified_base 34: mod_base = OTHER; note = 2'-O-methyl modified nucleotide
  modified_base 35: mod_base = OTHER; note = 2'-O-methyl modified nucleotide
  modified_base 36: mod_base = OTHER; note = 2'-O-methyl modified nucleotide

SEQ ID NO: 1617 - RNA, 36 nt, synthetic construct; identical to SEQ ID NO: 1547
  source 1..36: mol_type = other RNA
  modified_base 1: mod_base = OTHER; note = 2'-O-methyl modified nucleotide with phosphorothioate linkage
  modified_base 2: mod_base = OTHER; note = 2'-O-methyl modified nucleotide
  modified_base 3: mod_base = OTHER; note = 2'-fluoro modified nucleotide
  modified_base 4: mod_base = OTHER; note = 2'-O-methyl modified nucleotide
  modified_base 5: mod_base = OTHER; note = 2'-fluoro modified nucleotide
  modified_base 6: mod_base = OTHER; note = 2'-O-methyl modified nucleotide
  modified_base 7: mod_base = OTHER; note = 2'-O-methyl modified nucleotide
  modified_base 8: mod_base = OTHER; note = 2'-fluoro modified nucleotide
  modified_base 9: mod_base = OTHER; note = 2'-O-methyl modified nucleotide
  modified_base 10: mod_base = OTHER; note = 2'-fluoro modified nucleotide
  modified_base 11: mod_base = OTHER; note = 2'-O-methyl modified nucleotide
  modified_base 12: mod_base = OTHER; note = 2'-fluoro modified nucleotide
  modified_base 13: mod_base = OTHER; note = 2'-fluoro modified nucleotide
  modified_base 14: mod_base = OTHER; note = 2'-O-methyl modified nucleotide
  modified_base 15: mod_base = OTHER; note = 2'-fluoro modified nucleotide
  modified_base 16: mod_base = OTHER; note = 2'-O-methyl modified nucleotide
  modified_base 17: mod_base = OTHER; note = 2'-fluoro modified nucleotide
  modified_base 18: mod_base = OTHER; note = 2'-O-methyl modified nucleotide
  modified_base 19: mod_base = OTHER; note = 2'-O-methyl modified nucleotide
  modified_base 20: mod_base = OTHER; note = 2'-O-methyl modified nucleotide
  modified_base 21: mod_base = OTHER; note = 2'-O-methyl modified nucleotide
  modified_base 22: mod_base = OTHER; note = 2'-O-methyl modified nucleotide
  modified_base 23: mod_base = OTHER; note = 2'-O-methyl modified nucleotide
  modified_base 24: mod_base = OTHER; note = 2'-O-methyl modified nucleotide
  modified_base 25: mod_base = OTHER; note = 2'-O-methyl modified nucleotide
  modified_base 26: mod_base = OTHER; note = 2'-O-methyl modified nucleotide
  modified_base 27: mod_base = OTHER; note = 2'-O-methyl modified nucleotide
  modified_base 28: mod_base = OTHER; note 2'-aminodiethoxymethanol-Adenine-N-Acetylgalactosamine
  modified_base 29: mod_base = OTHER; note 2'-aminodiethoxymethanol-Adenine-N-Acetylgalactosamine
  modified_base 30: mod_base = OTHER; note 2'-aminodiethoxymethanol-Adenine-N-Acetylgalactosamine
  modified_base 31: mod_base = OTHER; note = 2'-O-methyl modified nucleotide
  modified_base 32: mod_base = OTHER; note = 2'-O-methyl modified nucleotide
  modified_base 33: mod_base = OTHER; note = 2'-O-methyl modified nucleotide
  modified_base 34: mod_base = OTHER; note = 2'-O-methyl modified nucleotide
  modified_base 35: mod_base = OTHER; note = 2'-O-methyl modified nucleotide
  modified_base 36: mod_base = OTHER; note = 2'-O-methyl modified nucleotide

SEQ ID NO: 1618 - RNA, 36 nt, synthetic construct; identical to SEQ ID NO: 1548
  source 1..36: mol_type = other RNA
  modified_base 1: mod_base = OTHER; note = 2'-O-methyl modified nucleotide with phosphorothioate linkage
  modified_base 2: mod_base = OTHER; note = 2'-O-methyl modified nucleotide
  modified_base 3: mod_base = OTHER; note = 2'-fluoro modified nucleotide
  modified_base 4: mod_base = OTHER; note = 2'-O-methyl modified nucleotide
  modified_base 5: mod_base = OTHER; note = 2'-fluoro modified nucleotide
  modified_base 6: mod_base = OTHER; note = 2'-O-methyl modified nucleotide
  modified_base 7: mod_base = OTHER; note = 2'-O-methyl modified nucleotide
  modified_base 8: mod_base = OTHER; note = 2'-fluoro modified nucleotide
  modified_base 9: mod_base = OTHER; note = 2'-O-methyl modified nucleotide
  modified_base 10: mod_base = OTHER; note = 2'-fluoro modified nucleotide
  modified_base 11: mod_base = OTHER; note = 2'-O-methyl modified nucleotide
  modified_base 12: mod_base = OTHER; note = 2'-fluoro modified nucleotide
  modified_base 13: mod_base = OTHER; note = 2'-fluoro modified nucleotide
  modified_base 14: mod_base = OTHER; note = 2'-O-methyl modified nucleotide
  modified_base 15: mod_base = OTHER; note = 2'-fluoro modified nucleotide
  modified_base 16: mod_base = OTHER; note = 2'-O-methyl modified nucleotide
  modified_base 17: mod_base = OTHER; note = 2'-fluoro modified nucleotide
  modified_base 18: mod_base = OTHER; note = 2'-O-methyl modified nucleotide
  modified_base 19: mod_base = OTHER; note = 2'-O-methyl modified nucleotide
  modified_base 20: mod_base = OTHER; note = 2'-O-methyl modified nucleotide
  modified_base 21: mod_base = OTHER; note = 2'-O-methyl modified nucleotide
  modified_base 22: mod_base = OTHER; note = 2'-O-methyl modified nucleotide
  modified_base 23: mod_base = OTHER; note = 2'-O-methyl modified nucleotide
  modified_base 24: mod_base = OTHER; note = 2'-O-methyl modified nucleotide
  modified_base 25: mod_base = OTHER; note = 2'-O-methyl modified nucleotide
  modified_base 26: mod_base = OTHER; note = 2'-O-methyl modified nucleotide
  modified_base 27: mod_base = OTHER; note = 2'-O-methyl modified nucleotide
  modified_base 28: mod_base = OTHER; note 2'-aminodiethoxymethanol-Adenine-N-Acetylgalactosamine
  modified_base 29: mod_base = OTHER; note 2'-aminodiethoxymethanol-Adenine-N-Acetylgalactosamine
  modified_base 30: mod_base = OTHER; note 2'-aminodiethoxymethanol-Adenine-N-Acetylgalactosamine
  modified_base 31: mod_base = OTHER; note = 2'-O-methyl modified nucleotide
  modified_base 32: mod_base = OTHER; note = 2'-O-methyl modified nucleotide
  modified_base 33: mod_base = OTHER; note = 2'-O-methyl modified nucleotide
  modified_base 34: mod_base = OTHER; note = 2'-O-methyl modified nucleotide
  modified_base 35: mod_base = OTHER; note = 2'-O-methyl modified nucleotide
  modified_base 36: mod_base = OTHER; note = 2'-O-methyl modified nucleotide

SEQ ID NO: 1619 - RNA, 36 nt, synthetic construct; identical to SEQ ID NO: 1549
  source 1..36: mol_type = other RNA
  modified_base 1: mod_base = OTHER; note = 2'-O-methyl modified nucleotide with phosphorothioate linkage
  modified_base 2: mod_base = OTHER; note = 2'-O-methyl modified nucleotide
  modified_base 3: mod_base = OTHER; note = 2'-fluoro modified nucleotide
  modified_base 4: mod_base = OTHER; note = 2'-O-methyl modified nucleotide
  modified_base 5: mod_base = OTHER; note = 2'-fluoro modified nucleotide
  modified_base 6: mod_base = OTHER; note = 2'-O-methyl modified nucleotide
  modified_base 7: mod_base = OTHER; note = 2'-O-methyl modified nucleotide
  modified_base 8: mod_base = OTHER; note = 2'-fluoro modified nucleotide
  modified_base 9: mod_base = OTHER; note = 2'-O-methyl modified nucleotide
  modified_base 10: mod_base = OTHER; note = 2'-fluoro modified nucleotide
  modified_base 11: mod_base = OTHER; note = 2'-O-methyl modified nucleotide
  modified_base 12: mod_base = OTHER; note = 2'-fluoro modified nucleotide
  modified_base 13: mod_base = OTHER; note = 2'-fluoro modified nucleotide
  modified_base 14: mod_base = OTHER; note = 2'-O-methyl modified nucleotide
  modified_base 15: mod_base = OTHER; note = 2'-fluoro modified nucleotide
  modified_base 16: mod_base = OTHER; note = 2'-O-methyl modified nucleotide
  modified_base 17: mod_base = OTHER; note = 2'-fluoro modified nucleotide
  modified_base 18: mod_base = OTHER; note = 2'-O-methyl modified nucleotide
  modified_base 19: mod_base = OTHER; note = 2'-O-methyl modified nucleotide
  modified_base 20: mod_base = OTHER; note = 2'-O-methyl modified nucleotide
  modified_base 21: mod_base = OTHER; note = 2'-O-methyl modified nucleotide
  modified_base 22: mod_base = OTHER; note = 2'-O-methyl modified nucleotide
  modified_base 23: mod_base = OTHER; note = 2'-O-methyl modified nucleotide
  modified_base 24: mod_base = OTHER; note = 2'-O-methyl modified nucleotide
  modified_base 25: mod_base = OTHER; note = 2'-O-methyl modified nucleotide
  modified_base 26: mod_base = OTHER; note = 2'-O-methyl modified nucleotide
  modified_base 27: mod_base = OTHER; note = 2'-O-methyl modified nucleotide
  modified_base 28: mod_base = OTHER; note 2'-aminodiethoxymethanol-Adenine-N-Acetylgalactosamine
  modified_base 29: mod_base = OTHER; note 2'-aminodiethoxymethanol-Adenine-N-Acetylgalactosamine
  modified_base 30: mod_base = OTHER; note 2'-aminodiethoxymethanol-Adenine-N-Acetylgalactosamine
  modified_base 31: mod_base = OTHER; note = 2'-O-methyl modified nucleotide
  modified_base 32: mod_base = OTHER; note = 2'-O-methyl modified nucleotide
  modified_base 33: mod_base = OTHER; note = 2'-O-methyl modified nucleotide
  modified_base 34: mod_base = OTHER; note = 2'-O-methyl modified nucleotide
  modified_base 35: mod_base = OTHER; note = 2'-O-methyl modified nucleotide
  modified_base 36: mod_base = OTHER; note = 2'-O-methyl modified nucleotide

SEQ ID NO: 1620 - RNA, 36 nt, synthetic construct; identical to SEQ ID NO: 1550
  source 1..36: mol_type = other RNA
  modified_base 1: mod_base = OTHER; note = 2'-O-methyl modified nucleotide with phosphorothioate linkage
  modified_base 2: mod_base = OTHER; note = 2'-O-methyl modified nucleotide
  modified_base 3: mod_base = OTHER; note = 2'-fluoro modified nucleotide
  modified_base 4: mod_base = OTHER; note = 2'-O-methyl modified nucleotide
  modified_base 5: mod_base = OTHER; note = 2'-fluoro modified nucleotide
  modified_base 6: mod_base = OTHER; note = 2'-O-methyl modified nucleotide
  modified_base 7: mod_base = OTHER; note = 2'-O-methyl modified nucleotide
  modified_base 8: mod_base = OTHER; note = 2'-fluoro modified nucleotide
  modified_base 9: mod_base = OTHER; note = 2'-O-methyl modified nucleotide
  modified_base 10: mod_base = OTHER; note = 2'-fluoro modified nucleotide
  modified_base 11: mod_base = OTHER; note = 2'-O-methyl modified nucleotide
  modified_base 12: mod_base = OTHER; note = 2'-fluoro modified nucleotide
  modified_base 13: mod_base = OTHER; note = 2'-fluoro modified nucleotide
  modified_base 14: mod_base = OTHER; note = 2'-O-methyl modified nucleotide
  modified_base 15: mod_base = OTHER; note = 2'-fluoro modified nucleotide
  modified_base 16: mod_base = OTHER; note = 2'-O-methyl modified nucleotide
  modified_base 17: mod_base = OTHER; note = 2'-fluoro modified nucleotide
  modified_base 18: mod_base = OTHER; note = 2'-O-methyl modified nucleotide
  modified_base 19: mod_base = OTHER; note = 2'-O-methyl modified nucleotide
  modified_base 20: mod_base = OTHER; note = 2'-O-methyl modified nucleotide
  modified_base 21: mod_base = OTHER; note = 2'-O-methyl modified nucleotide
  modified_base 22: mod_base = OTHER; note = 2'-O-methyl modified nucleotide
  modified_base 23: mod_base = OTHER; note = 2'-O-methyl modified nucleotide
  modified_base 24: mod_base = OTHER; note = 2'-O-methyl modified nucleotide
  modified_base 25: mod_base = OTHER; note = 2'-O-methyl modified nucleotide
  modified_base 26: mod_base = OTHER; note = 2'-O-methyl modified nucleotide
  modified_base 27: mod_base = OTHER; note = 2'-O-methyl modified nucleotide
  modified_base 28: mod_base = OTHER; note 2'-aminodiethoxymethanol-Adenine-N-Acetylgalactosamine
  modified_base 29: mod_base = OTHER; note 2'-aminodiethoxymethanol-Adenine-N-Acetylgalactosamine
  modified_base 30: mod_base = OTHER; note 2'-aminodiethoxymethanol-Adenine-N-Acetylgalactosamine
  modified_base 31: mod_base = OTHER; note = 2'-O-methyl modified nucleotide
  modified_base 32: mod_base = OTHER; note = 2'-O-methyl modified nucleotide
  modified_base 33: mod_base = OTHER; note = 2'-O-methyl modified nucleotide
  modified_base 34: mod_base = OTHER; note = 2'-O-methyl modified nucleotide
  modified_base 35: mod_base = OTHER; note = 2'-O-methyl modified nucleotide
  modified_base 36: mod_base = OTHER; note = 2'-O-methyl modified nucleotide

SEQ ID NO: 1621 - RNA, 36 nt, synthetic construct; identical to SEQ ID NO: 1551
  source 1..36: mol_type = other RNA
  modified_base 1: mod_base = OTHER; note = 2'-O-methyl modified nucleotide with phosphorothioate linkage
  modified_base 2: mod_base = OTHER; note = 2'-O-methyl modified nucleotide
  modified_base 3: mod_base = OTHER; note = 2'-fluoro modified nucleotide
  modified_base 4: mod_base = OTHER; note = 2'-O-methyl modified nucleotide
  modified_base 5: mod_base = OTHER; note = 2'-fluoro modified nucleotide
  modified_base 6: mod_base = OTHER; note = 2'-O-methyl modified nucleotide
  modified_base 7: mod_base = OTHER; note = 2'-O-methyl modified nucleotide
  modified_base 8: mod_base = OTHER; note = 2'-fluoro modified nucleotide
  modified_base 9: mod_base = OTHER; note = 2'-O-methyl modified nucleotide
  modified_base 10: mod_base = OTHER; note = 2'-fluoro modified nucleotide
  modified_base 11: mod_base = OTHER; note = 2'-O-methyl modified nucleotide
  modified_base 12: mod_base = OTHER; note = 2'-fluoro modified nucleotide
  modified_base 13: mod_base = OTHER; note = 2'-fluoro modified nucleotide
  modified_base 14: mod_base = OTHER; note = 2'-O-methyl modified nucleotide
  modified_base 15: mod_base = OTHER; note = 2'-fluoro modified nucleotide
  modified_base 16: mod_base = OTHER; note = 2'-O-methyl modified nucleotide
  modified_base 17: mod_base = OTHER; note = 2'-fluoro modified nucleotide
  modified_base 18: mod_base = OTHER; note = 2'-O-methyl modified nucleotide
  modified_base 19: mod_base = OTHER; note = 2'-O-methyl modified nucleotide
  modified_base 20: mod_base = OTHER; note = 2'-O-methyl modified nucleotide
  modified_base 21: mod_base = OTHER; note = 2'-O-methyl modified nucleotide
  modified_base 22: mod_base = OTHER; note = 2'-O-methyl modified nucleotide
  modified_base 23: mod_base = OTHER; note = 2'-O-methyl modified nucleotide
  modified_base 24: mod_base = OTHER; note = 2'-O-methyl modified nucleotide
  modified_base 25: mod_base = OTHER; note = 2'-O-methyl modified nucleotide
  modified_base 26: mod_base = OTHER; note = 2'-O-methyl modified nucleotide
  modified_base 27: mod_base = OTHER; note = 2'-O-methyl modified nucleotide
  modified_base 28: mod_base = OTHER; note 2'-aminodiethoxymethanol-Adenine-N-Acetylgalactosamine
  modified_base 29: mod_base = OTHER; note 2'-aminodiethoxymethanol-Adenine-N-Acetylgalactosamine
  modified_base 30: mod_base = OTHER; note 2'-aminodiethoxymethanol-Adenine-N-Acetylgalactosamine
  modified_base 31: mod_base = OTHER; note = 2'-O-methyl modified nucleotide
  modified_base 32: mod_base = OTHER; note = 2'-O-methyl modified nucleotide
  modified_base 33: mod_base = OTHER; note = 2'-O-methyl modified nucleotide
  modified_base 34: mod_base = OTHER; note = 2'-O-methyl modified nucleotide
  modified_base 35: mod_base = OTHER; note = 2'-O-methyl modified nucleotide
  modified_base 36: mod_base = OTHER; note = 2'-O-methyl modified nucleotide

SEQ ID NO: 1622 - RNA, 36 nt, synthetic construct; identical to SEQ ID NO: 1552
  source 1..36: mol_type = other RNA
  modified_base 1: mod_base = OTHER; note = 2'-O-methyl modified nucleotide with phosphorothioate linkage
  modified_base 2: mod_base = OTHER; note = 2'-O-methyl modified nucleotide
  modified_base 3: mod_base = OTHER; note = 2'-fluoro modified nucleotide
  modified_base 4: mod_base = OTHER; note = 2'-O-methyl modified nucleotide
  modified_base 5: mod_base = OTHER; note = 2'-fluoro modified nucleotide
  modified_base 6: mod_base = OTHER; note = 2'-O-methyl modified nucleotide
  modified_base 7: mod_base = OTHER; note = 2'-O-methyl modified nucleotide
  modified_base 8: mod_base = OTHER; note = 2'-fluoro modified nucleotide
  modified_base 9: mod_base = OTHER; note = 2'-O-methyl modified nucleotide
  modified_base 10: mod_base = OTHER; note = 2'-fluoro modified nucleotide
  modified_base 11: mod_base = OTHER; note = 2'-O-methyl modified nucleotide
  modified_base 12: mod_base = OTHER; note = 2'-fluoro modified nucleotide
  modified_base 13: mod_base = OTHER; note = 2'-fluoro modified nucleotide
  modified_base 14: mod_base = OTHER; note = 2'-O-methyl modified nucleotide
  modified_base 15: mod_base = OTHER; note = 2'-fluoro modified nucleotide
  modified_base 16: mod_base = OTHER; note = 2'-O-methyl modified nucleotide
  modified_base 17: mod_base = OTHER; note = 2'-fluoro modified nucleotide
  modified_base 18: mod_base = OTHER; note = 2'-O-methyl modified nucleotide
  modified_base 19: mod_base = OTHER; note = 2'-O-methyl modified nucleotide
  modified_base 20: mod_base = OTHER; note = 2'-O-methyl modified nucleotide
  modified_base 21: mod_base = OTHER; note = 2'-O-methyl modified nucleotide
  modified_base 22: mod_base = OTHER; note = 2'-O-methyl modified nucleotide
  modified_base 23: mod_base = OTHER; note = 2'-O-methyl modified nucleotide
  modified_base 24: mod_base = OTHER; note = 2'-O-methyl modified nucleotide
  modified_base 25: mod_base = OTHER; note = 2'-O-methyl modified nucleotide
  modified_base 26: mod_base = OTHER; note = 2'-O-methyl modified nucleotide
  modified_base 27: mod_base = OTHER; note = 2'-O-methyl modified nucleotide
  modified_base 28: mod_base = OTHER; note 2'-aminodiethoxymethanol-Adenine-N-Acetylgalactosamine
  modified_base 29: mod_base = OTHER; note 2'-aminodiethoxymethanol-Adenine-N-Acetylgalactosamine
  modified_base 30: mod_base = OTHER; note 2'-aminodiethoxymethanol-Adenine-N-Acetylgalactosamine
  modified_base 31: mod_base = OTHER; note = 2'-O-methyl modified nucleotide
  modified_base 32: mod_base = OTHER; note = 2'-O-methyl modified nucleotide
  modified_base 33: mod_base = OTHER; note = 2'-O-methyl modified nucleotide
  modified_base 34: mod_base = OTHER; note = 2'-O-methyl modified nucleotide
  modified_base 35: mod_base = OTHER; note = 2'-O-methyl modified nucleotide
  modified_base 36: mod_base = OTHER; note = 2'-O-methyl modified nucleotide

SEQ ID NO: 1623 - RNA, 36 nt, synthetic construct; identical to SEQ ID NO: 1553
  source 1..36: mol_type = other RNA
  modified_base 1: mod_base = OTHER; note = 2'-O-methyl modified nucleotide with phosphorothioate linkage
  modified_base 2: mod_base = OTHER; note = 2'-O-methyl modified nucleotide
  modified_base 3: mod_base = OTHER; note = 2'-fluoro modified nucleotide
  modified_base 4: mod_base = OTHER; note = 2'-O-methyl modified nucleotide
  modified_base 5: mod_base = OTHER; note = 2'-fluoro modified nucleotide
  modified_base 6: mod_base = OTHER; note = 2'-O-methyl modified nucleotide
  modified_base 7: mod_base = OTHER; note = 2'-O-methyl modified nucleotide
  modified_base 8: mod_base = OTHER; note = 2'-fluoro modified nucleotide
  modified_base 9: mod_base = OTHER; note = 2'-O-methyl modified nucleotide
  modified_base 10: mod_base = OTHER; note = 2'-fluoro modified nucleotide
  modified_base 11: mod_base = OTHER; note = 2'-O-methyl modified nucleotide
  modified_base 12: mod_base = OTHER; note = 2'-fluoro modified nucleotide
  modified_base 13: mod_base = OTHER; note = 2'-fluoro modified nucleotide
  modified_base 14: mod_base = OTHER; note = 2'-O-methyl modified nucleotide
  modified_base 15: mod_base = OTHER; note = 2'-fluoro modified nucleotide
  modified_base 16: mod_base = OTHER; note = 2'-O-methyl modified nucleotide
  modified_base 17: mod_base = OTHER; note = 2'-fluoro modified nucleotide
  modified_base 18: mod_base = OTHER; note = 2'-O-methyl modified nucleotide
  modified_base 19: mod_base = OTHER; note = 2'-O-methyl modified nucleotide
  modified_base 20: mod_base = OTHER; note = 2'-O-methyl modified nucleotide
  modified_base 21: mod_base = OTHER; note = 2'-O-methyl modified nucleotide
  modified_base 22: mod_base = OTHER; note = 2'-O-methyl modified nucleotide
  modified_base 23: mod_base = OTHER; note = 2'-O-methyl modified nucleotide
  modified_base 24: mod_base = OTHER; note = 2'-O-methyl modified nucleotide
  modified_base 25: mod_base = OTHER; note = 2'-O-methyl modified nucleotide
  modified_base 26: mod_base = OTHER; note = 2'-O-methyl modified nucleotide
  modified_base 27: mod_base = OTHER; note = 2'-O-methyl modified nucleotide
  modified_base 28: mod_base = OTHER; note 2'-aminodiethoxymethanol-Adenine-N-Acetylgalactosamine
  modified_base 29: mod_base = OTHER; note 2'-aminodiethoxymethanol-Adenine-N-Acetylgalactosamine
  modified_base 30: mod_base = OTHER; note 2'-aminodiethoxymethanol-Adenine-N-Acetylgalactosamine
  modified_base 31: mod_base = OTHER; note = 2'-O-methyl modified nucleotide
  modified_base 32: mod_base = OTHER; note = 2'-O-methyl modified nucleotide
  modified_base 33: mod_base = OTHER; note = 2'-O-methyl modified nucleotide
  modified_base 34: mod_base = OTHER; note = 2'-O-methyl modified nucleotide
  modified_base 35: mod_base = OTHER; note = 2'-O-methyl modified nucleotide
  modified_base 36: mod_base = OTHER; note = 2'-O-methyl modified nucleotide

SEQ ID NO: 1624 - RNA, 36 nt, synthetic construct; identical to SEQ ID NO: 1554
  source 1..36: mol_type = other RNA
  modified_base 1: mod_base = OTHER; note = 2'-O-methyl modified nucleotide with phosphorothioate linkage
  modified_base 2: mod_base = OTHER; note = 2'-O-methyl modified nucleotide
  modified_base 3: mod_base = OTHER; note = 2'-O-methyl modified nucleotide
  modified_base 4: mod_base = OTHER; note = 2'-O-methyl modified nucleotide
  modified_base 5: mod_base = OTHER; note = 2'-O-methyl modified nucleotide
  modified_base 6: mod_base = OTHER; note = 2'-O-methyl modified nucleotide
  modified_base 7: mod_base = OTHER; note = 2'-O-methyl modified nucleotide
  modified_base 8: mod_base = OTHER; note = 2'-fluoro modified nucleotide
  modified_base 9: mod_base = OTHER; note = 2'-fluoro modified nucleotide
  modified_base 10: mod_base = OTHER; note = 2'-fluoro modified nucleotide
  modified_base 11: mod_base = OTHER; note = 2'-fluoro modified nucleotide
  modified_base 12: mod_base = OTHER; note = 2'-O-methyl modified nucleotide
  modified_base 13: mod_base = OTHER; note = 2'-O-methyl modified nucleotide
  modified_base 14: mod_base = OTHER; note = 2'-O-methyl modified nucleotide
  modified_base 15: mod_base = OTHER; note = 2'-O-methyl modified nucleotide
  modified_base 16: mod_base = OTHER; note = 2'-O-methyl modified nucleotide
  modified_base 17: mod_base = OTHER; note = 2'-O-methyl modified nucleotide
  modified_base 18: mod_base = OTHER; note = 2'-O-methyl modified nucleotide
  modified_base 19: mod_base = OTHER; note = 2'-O-methyl modified nucleotide
  modified_base 20: mod_base = OTHER; note = 2'-O-methyl modified nucleotide
  modified_base 21: mod_base = OTHER; note = 2'-O-methyl modified nucleotide
  modified_base 22: mod_base = OTHER; note = 2'-O-methyl modified nucleotide
  modified_base 23: mod_base = OTHER; note = 2'-O-methyl modified nucleotide
  modified_base 24: mod_base = OTHER; note = 2'-O-methyl modified nucleotide
  modified_base 25: mod_base = OTHER; note = 2'-O-methyl modified nucleotide
  modified_base 26: mod_base = OTHER; note = 2'-O-methyl modified nucleotide
  modified_base 27: mod_base = OTHER; note = 2'-O-methyl modified nucleotide
  modified_base 28: mod_base = OTHER; note 2'-aminodiethoxymethanol-Adenine-N-Acetylgalactosamine
  modified_base 29: mod_base = OTHER; note 2'-aminodiethoxymethanol-Adenine-N-Acetylgalactosamine
  modified_base 30: mod_base = OTHER; note 2'-aminodiethoxymethanol-Adenine-N-Acetylgalactosamine
  modified_base 31: mod_base = OTHER; note = 2'-O-methyl modified nucleotide
  modified_base 32: mod_base = OTHER; note = 2'-O-methyl modified nucleotide
  modified_base 33: mod_base = OTHER; note = 2'-O-methyl modified nucleotide
  modified_base 34: mod_base = OTHER; note = 2'-O-methyl modified nucleotide
  modified_base 35: mod_base = OTHER; note = 2'-O-methyl modified nucleotide
  modified_base 36: mod_base = OTHER; note = 2'-O-methyl modified nucleotide

SEQ ID NO: 1625 - RNA, 36 nt, synthetic construct; identical to SEQ ID NO: 1555
  source 1..36: mol_type = other RNA
  modified_base 1: mod_base = OTHER; note = 2'-O-methyl modified nucleotide with phosphorothioate linkage
  modified_base 2: mod_base = OTHER; note = 2'-O-methyl modified nucleotide
  modified_base 3: mod_base = OTHER; note = 2'-fluoro modified nucleotide
  modified_base 4: mod_base = OTHER; note = 2'-O-methyl modified nucleotide
  modified_base 5: mod_base = OTHER; note = 2'-fluoro modified nucleotide
  modified_base 6: mod_base = OTHER; note = 2'-O-methyl modified nucleotide
  modified_base 7: mod_base = OTHER; note = 2'-O-methyl modified nucleotide
  modified_base 8: mod_base = OTHER; note = 2'-fluoro modified nucleotide
  modified_base 9: mod_base = OTHER; note = 2'-O-methyl modified nucleotide
  modified_base 10: mod_base = OTHER; note = 2'-fluoro modified nucleotide
  modified_base 11: mod_base = OTHER; note = 2'-O-methyl modified nucleotide
  modified_base 12: mod_base = OTHER; note = 2'-fluoro modified nucleotide
  modified_base 13: mod_base = OTHER; note = 2'-fluoro modified nucleotide
  modified_base 14: mod_base = OTHER; note = 2'-O-methyl modified nucleotide
  modified_base 15: mod_base = OTHER; note = 2'-fluoro modified nucleotide
  modified_base 16: mod_base = OTHER; note = 2'-O-methyl modified nucleotide
  modified_base 17: mod_base = OTHER; note = 2'-fluoro modified nucleotide
  modified_base 18: mod_base = OTHER; note = 2'-O-methyl modified nucleotide
  modified_base 19: mod_base = OTHER; note = 2'-O-methyl modified nucleotide
  modified_base 20: mod_base = OTHER; note = 2'-O-methyl modified nucleotide
  modified_base 21: mod_base = OTHER; note = 2'-O-methyl modified nucleotide
  modified_base 22: mod_base = OTHER; note = 2'-O-methyl modified nucleotide
  modified_base 23: mod_base = OTHER; note = 2'-O-methyl modified nucleotide
  modified_base 24: mod_base = OTHER; note = 2'-O-methyl modified nucleotide
  modified_base 25: mod_base = OTHER; note = 2'-O-methyl modified nucleotide
  modified_base 26: mod_base = OTHER; note = 2'-O-methyl modified nucleotide
  modified_base 27: mod_base = OTHER; note = 2'-O-methyl modified nucleotide
  modified_base 28: mod_base = OTHER; note 2'-aminodiethoxymethanol-Adenine-N-Acetylgalactosamine
  modified_base 29: mod_base = OTHER; note 2'-aminodiethoxymethanol-Adenine-N-Acetylgalactosamine
  modified_base 30: mod_base = OTHER; note 2'-aminodiethoxymethanol-Adenine-N-Acetylgalactosamine
  modified_base 31: mod_base = OTHER; note = 2'-O-methyl modified nucleotide
  modified_base 32: mod_base = OTHER; note = 2'-O-methyl modified nucleotide
  modified_base 33: mod_base = OTHER; note = 2'-O-methyl modified nucleotide
  modified_base 34: mod_base = OTHER; note = 2'-O-methyl modified nucleotide
  modified_base 35: mod_base = OTHER; note = 2'-O-methyl modified nucleotide
  modified_base 36: mod_base = OTHER; note = 2'-O-methyl modified nucleotide

SEQ ID NO: 1626 - RNA, 36 nt, synthetic construct; identical to SEQ ID NO: 1556
  source 1..36: mol_type = other RNA
  modified_base 1: mod_base = OTHER; note = 2'-O-methyl modified nucleotide with phosphorothioate linkage
  modified_base 2: mod_base = OTHER; note = 2'-O-methyl modified nucleotide
  modified_base 3: mod_base = OTHER; note = 2'-fluoro modified nucleotide
  modified_base 4: mod_base = OTHER; note = 2'-O-methyl modified nucleotide
  modified_base 5: mod_base = OTHER; note = 2'-fluoro modified nucleotide
  modified_base 6: mod_base = OTHER; note = 2'-O-methyl modified nucleotide
  modified_base 7: mod_base = OTHER; note = 2'-O-methyl modified nucleotide
  modified_base 8: mod_base = OTHER; note = 2'-fluoro modified nucleotide
  modified_base 9: mod_base = OTHER; note = 2'-O-methyl modified nucleotide
  modified_base 10: mod_base = OTHER; note = 2'-fluoro modified nucleotide
  modified_base 11: mod_base = OTHER; note = 2'-O-methyl modified nucleotide
  modified_base 12: mod_base = OTHER; note = 2'-fluoro modified nucleotide
  modified_base 13: mod_base = OTHER; note = 2'-fluoro modified nucleotide
  modified_base 14: mod_base = OTHER; note = 2'-O-methyl modified nucleotide
  modified_base 15: mod_base = OTHER; note = 2'-fluoro modified nucleotide
  modified_base 16: mod_base = OTHER; note = 2'-O-methyl modified nucleotide
  modified_base 17: mod_base = OTHER; note = 2'-fluoro modified nucleotide
  modified_base 18: mod_base = OTHER; note = 2'-O-methyl modified nucleotide
  modified_base 19: mod_base = OTHER; note = 2'-O-methyl modified nucleotide
  modified_base 20: mod_base = OTHER; note = 2'-O-methyl modified nucleotide
  modified_base 21: mod_base = OTHER; note = 2'-O-methyl modified nucleotide
  modified_base 22: mod_base = OTHER; note = 2'-O-methyl modified nucleotide
  modified_base 23: mod_base = OTHER; note = 2'-O-methyl modified nucleotide
  modified_base 24: mod_base = OTHER; note = 2'-O-methyl modified nucleotide
  modified_base 25: mod_base = OTHER; note = 2'-O-methyl modified nucleotide
  modified_base 26: mod_base = OTHER; note = 2'-O-methyl modified nucleotide
  modified_base 27: mod_base = OTHER; note = 2'-O-methyl modified nucleotide
  modified_base 28: mod_base = OTHER; note 2'-aminodiethoxymethanol-Adenine-N-Acetylgalactosamine
  modified_base 29: mod_base = OTHER; note 2'-aminodiethoxymethanol-Adenine-N-Acetylgalactosamine
  modified_base 30: mod_base = OTHER; note 2'-aminodiethoxymethanol-Adenine-N-Acetylgalactosamine
  modified_base 31: mod_base = OTHER; note = 2'-O-methyl modified nucleotide
  modified_base 32: mod_base = OTHER; note = 2'-O-methyl modified nucleotide
  modified_base 33: mod_base = OTHER; note = 2'-O-methyl modified nucleotide
  modified_base 34: mod_base = OTHER; note = 2'-O-methyl modified nucleotide
  modified_base 35: mod_base = OTHER; note = 2'-O-methyl modified nucleotide
  modified_base 36: mod_base = OTHER; note = 2'-O-methyl modified nucleotide

SEQ ID NO: 1627 - RNA, 36 nt, synthetic construct; identical to SEQ ID NO: 1557
  source 1..36: mol_type = other RNA
  modified_base 1: mod_base = OTHER; note = 2'-O-methyl modified nucleotide with phosphorothioate linkage
  modified_base 2: mod_base = OTHER; note = 2'-O-methyl modified nucleotide
  modified_base 3: mod_base = OTHER; note = 2'-fluoro modified nucleotide
  modified_base 4: mod_base = OTHER; note = 2'-O-methyl modified nucleotide
  modified_base 5: mod_base = OTHER; note = 2'-fluoro modified nucleotide
  modified_base 6: mod_base = OTHER; note = 2'-O-methyl modified nucleotide
  modified_base 7: mod_base = OTHER; note = 2'-O-methyl modified nucleotide
  modified_base 8: mod_base = OTHER; note = 2'-fluoro modified nucleotide
  modified_base 9: mod_base = OTHER; note = 2'-O-methyl modified nucleotide
  modified_base 10: mod_base = OTHER; note = 2'-fluoro modified nucleotide
  modified_base 11: mod_base = OTHER; note = 2'-O-methyl modified nucleotide
  modified_base 12: mod_base = OTHER; note = 2'-fluoro modified nucleotide
  modified_base 13: mod_base = OTHER; note = 2'-fluoro modified nucleotide
  modified_base 14: mod_base = OTHER; note = 2'-O-methyl modified nucleotide
  modified_base 15: mod_base = OTHER; note = 2'-fluoro modified nucleotide
  modified_base 16: mod_base = OTHER; note = 2'-O-methyl modified nucleotide
  modified_base 17: mod_base = OTHER; note = 2'-fluoro modified nucleotide
  modified_base 18: mod_base = OTHER; note = 2'-O-methyl modified nucleotide
  modified_base 19: mod_base = OTHER; note = 2'-O-methyl modified nucleotide
  modified_base 20: mod_base = OTHER; note = 2'-O-methyl modified nucleotide
  modified_base 21: mod_base = OTHER; note = 2'-O-methyl modified nucleotide
  modified_base 22: mod_base = OTHER; note = 2'-O-methyl modified nucleotide
  modified_base 23: mod_base = OTHER; note = 2'-O-methyl modified nucleotide
  modified_base 24: mod_base = OTHER; note = 2'-O-methyl modified nucleotide
  modified_base 25: mod_base = OTHER; note = 2'-O-methyl modified nucleotide
  modified_base 26: mod_base = OTHER; note = 2'-O-methyl modified nucleotide
  modified_base 27: mod_base = OTHER; note = 2'-O-methyl modified nucleotide
  modified_base 28: mod_base = OTHER; note 2'-aminodiethoxymethanol-Adenine-N-Acetylgalactosamine
  modified_base 29: mod_base = OTHER; note 2'-aminodiethoxymethanol-Adenine-N-Acetylgalactosamine
  modified_base 30: mod_base = OTHER; note 2'-aminodiethoxymethanol-Adenine-N-Acetylgalactosamine
  modified_base 31: mod_base = OTHER; note = 2'-O-methyl modified nucleotide
  modified_base 32: mod_base = OTHER; note = 2'-O-methyl modified nucleotide
  modified_base 33: mod_base = OTHER; note = 2'-O-methyl modified nucleotide
  modified_base 34: mod_base = OTHER; note = 2'-O-methyl modified nucleotide
  modified_base 35: mod_base = OTHER; note = 2'-O-methyl modified nucleotide
  modified_base 36: mod_base = OTHER; note = 2'-O-methyl modified nucleotide

SEQ ID NO: 1628 - RNA, 36 nt, synthetic construct; identical to SEQ ID NO: 1558
  source 1..36: mol_type = other RNA
  modified_base 1: mod_base = OTHER; note = 2'-O-methyl modified nucleotide with phosphorothioate linkage
  modified_base 2: mod_base = OTHER; note = 2'-O-methyl modified nucleotide
  modified_base 3: mod_base = OTHER; note = 2'-fluoro modified nucleotide
  modified_base 4: mod_base = OTHER; note = 2'-O-methyl modified nucleotide
  modified_base 5: mod_base = OTHER; note = 2'-fluoro modified nucleotide
  modified_base 6: mod_base = OTHER; note = 2'-O-methyl modified nucleotide
  modified_base 7: mod_base = OTHER; note = 2'-O-methyl modified nucleotide
  modified_base 8: mod_base = OTHER; note = 2'-fluoro modified nucleotide
  modified_base 9: mod_base = OTHER; note = 2'-O-methyl modified nucleotide
  modified_base 10: mod_base = OTHER; note = 2'-fluoro modified nucleotide
  modified_base 11: mod_base = OTHER; note = 2'-O-methyl modified nucleotide
  modified_base 12: mod_base = OTHER; note = 2'-fluoro modified nucleotide
  modified_base 13: mod_base = OTHER; note = 2'-fluoro modified nucleotide
  modified_base 14: mod_base = OTHER; note = 2'-O-methyl modified nucleotide
  modified_base 15: mod_base = OTHER; note = 2'-fluoro modified nucleotide
  modified_base 16: mod_base = OTHER; note = 2'-O-methyl modified nucleotide
  modified_base 17: mod_base = OTHER; note = 2'-fluoro modified nucleotide
  modified_base 18: mod_base = OTHER; note = 2'-O-methyl modified nucleotide
  modified_base 19: mod_base = OTHER; note = 2'-O-methyl modified nucleotide
  modified_base 20: mod_base = OTHER; note = 2'-O-methyl modified nucleotide
  modified_base 21: mod_base = OTHER; note = 2'-O-methyl modified nucleotide
  modified_base 22: mod_base = OTHER; note = 2'-O-methyl modified nucleotide
  modified_base 23: mod_base = OTHER; note = 2'-O-methyl modified nucleotide
  modified_base 24: mod_base = OTHER; note = 2'-O-methyl modified nucleotide
  modified_base 25: mod_base = OTHER; note = 2'-O-methyl modified nucleotide
  modified_base 26: mod_base = OTHER; note = 2'-O-methyl modified nucleotide
  modified_base 27: mod_base = OTHER; note = 2'-O-methyl modified nucleotide
  modified_base 28: mod_base = OTHER; note 2'-aminodiethoxymethanol-Adenine-N-Acetylgalactosamine
  modified_base 29: mod_base = OTHER; note 2'-aminodiethoxymethanol-Adenine-N-Acetylgalactosamine
  modified_base 30: mod_base = OTHER; note 2'-aminodiethoxymethanol-Adenine-N-Acetylgalactosamine
  modified_base 31: mod_base = OTHER; note = 2'-O-methyl modified nucleotide
  modified_base 32: mod_base = OTHER; note = 2'-O-methyl modified nucleotide
  modified_base 33: mod_base = OTHER; note = 2'-O-methyl modified nucleotide
  modified_base 34: mod_base = OTHER; note = 2'-O-methyl modified nucleotide
  modified_base 35: mod_base = OTHER; note = 2'-O-methyl modified nucleotide
  modified_base 36: mod_base = OTHER; note = 2'-O-methyl modified nucleotide

SEQ ID NO: 1629 - RNA, 36 nt, synthetic construct; identical to SEQ ID NO: 1559
  source 1..36: mol_type = other RNA
  modified_base 1: mod_base = OTHER; note = 2'-O-methyl modified nucleotide with phosphorothioate linkage
  modified_base 2: mod_base = OTHER; note = 2'-O-methyl modified nucleotide
  modified_base 3: mod_base = OTHER; note = 2'-fluoro modified nucleotide
  modified_base 4: mod_base = OTHER; note = 2'-O-methyl modified nucleotide
  modified_base 5: mod_base = OTHER; note = 2'-fluoro modified nucleotide
  modified_base 6: mod_base = OTHER; note = 2'-O-methyl modified nucleotide
  modified_base 7: mod_base = OTHER; note = 2'-O-methyl modified nucleotide
  modified_base 8: mod_base = OTHER; note = 2'-fluoro modified nucleotide
  modified_base 9: mod_base = OTHER; note = 2'-O-methyl modified nucleotide
  modified_base 10: mod_base = OTHER; note = 2'-fluoro modified nucleotide
  modified_base 11: mod_base = OTHER; note = 2'-O-methyl modified nucleotide
  modified_base 12: mod_base = OTHER; note = 2'-fluoro modified nucleotide
  modified_base 13: mod_base = OTHER; note = 2'-fluoro modified nucleotide
  modified_base 14: mod_base = OTHER; note = 2'-O-methyl modified nucleotide
  modified_base 15: mod_base = OTHER; note = 2'-fluoro modified nucleotide
  modified_base 16: mod_base = OTHER; note = 2'-O-methyl modified nucleotide
  modified_base 17: mod_base = OTHER; note = 2'-fluoro modified nucleotide
  modified_base 18: mod_base = OTHER; note = 2'-O-methyl modified nucleotide
  modified_base 19: mod_base = OTHER; note = 2'-O-methyl modified nucleotide
  modified_base 20: mod_base = OTHER; note = 2'-O-methyl modified nucleotide
  modified_base 21: mod_base = OTHER; note = 2'-O-methyl modified nucleotide
  modified_base 22: mod_base = OTHER; note = 2'-O-methyl modified nucleotide
  modified_base 23: mod_base = OTHER; note = 2'-O-methyl modified nucleotide
  modified_base 24: mod_base = OTHER; note = 2'-O-methyl modified nucleotide
  modified_base 25: mod_base = OTHER; note = 2'-O-methyl modified nucleotide
  modified_base 26: mod_base = OTHER; note = 2'-O-methyl modified nucleotide
  modified_base 27: mod_base = OTHER; note = 2'-O-methyl modified nucleotide
  modified_base 28: mod_base = OTHER; note 2'-aminodiethoxymethanol-Adenine-N-Acetylgalactosamine
  modified_base 29: mod_base = OTHER; note 2'-aminodiethoxymethanol-Adenine-N-Acetylgalactosamine
  modified_base 30: mod_base = OTHER; note 2'-aminodiethoxymethanol-Adenine-N-Acetylgalactosamine
  modified_base 31: mod_base = OTHER; note = 2'-O-methyl modified nucleotide
  modified_base 32: mod_base = OTHER; note = 2'-O-methyl modified nucleotide
  modified_base 33: mod_base = OTHER; note = 2'-O-methyl modified nucleotide
  modified_base 34: mod_base = OTHER; note = 2'-O-methyl modified nucleotide
  modified_base 35: mod_base = OTHER; note = 2'-O-methyl modified nucleotide
  modified_base 36: mod_base = OTHER; note = 2'-O-methyl modified nucleotide

SEQ ID NO: 1630 - RNA, 36 nt, synthetic construct; identical to SEQ ID NO: 1560
  source 1..36: mol_type = other RNA
  modified_base 1: mod_base = OTHER; note = 2'-O-methyl modified nucleotide with phosphorothioate linkage
  modified_base 2: mod_base = OTHER; note = 2'-O-methyl modified nucleotide
  modified_base 3: mod_base = OTHER; note = 2'-fluoro modified nucleotide
  modified_base 4: mod_base = OTHER; note = 2'-O-methyl modified nucleotide
  modified_base 5: mod_base = OTHER; note = 2'-fluoro modified nucleotide
  modified_base 6: mod_base = OTHER; note = 2'-O-methyl modified nucleotide
  modified_base 7: mod_base = OTHER; note = 2'-O-methyl modified nucleotide
  modified_base 8: mod_base = OTHER; note = 2'-fluoro modified nucleotide
  modified_base 9: mod_base = OTHER; note = 2'-O-methyl modified nucleotide
  modified_base 10: mod_base = OTHER; note = 2'-fluoro modified nucleotide
  modified_base 11: mod_base = OTHER; note = 2'-O-methyl modified nucleotide
  modified_base 12: mod_base = OTHER; note = 2'-fluoro modified nucleotide
  modified_base 13: mod_base = OTHER; note = 2'-fluoro modified nucleotide
  modified_base 14: mod_base = OTHER; note = 2'-O-methyl modified nucleotide
  modified_base 15: mod_base = OTHER; note = 2'-fluoro modified nucleotide
  modified_base 16: mod_base = OTHER; note = 2'-O-methyl modified nucleotide
  modified_base 17: mod_base = OTHER; note = 2'-fluoro modified nucleotide
  modified_base 18: mod_base = OTHER; note = 2'-O-methyl modified nucleotide
  modified_base 19: mod_base = OTHER; note = 2'-O-methyl modified nucleotide
  modified_base 20: mod_base = OTHER; note = 2'-O-methyl modified nucleotide
  modified_base 21: mod_base = OTHER; note = 2'-O-methyl modified nucleotide
  modified_base 22: mod_base = OTHER; note = 2'-O-methyl modified nucleotide
  modified_base 23: mod_base = OTHER; note = 2'-O-methyl modified nucleotide
  modified_base 24: mod_base = OTHER; note = 2'-O-methyl modified nucleotide
  modified_base 25: mod_base = OTHER; note = 2'-O-methyl modified nucleotide
  modified_base 26: mod_base = OTHER; note = 2'-O-methyl modified nucleotide
  modified_base 27: mod_base = OTHER; note = 2'-O-methyl modified nucleotide
  modified_base 28: mod_base = OTHER; note 2'-aminodiethoxymethanol-Adenine-N-Acetylgalactosamine
  modified_base 29: mod_base = OTHER; note 2'-aminodiethoxymethanol-Adenine-N-Acetylgalactosamine
  modified_base 30: mod_base = OTHER; note 2'-aminodiethoxymethanol-Adenine-N-Acetylgalactosamine
  modified_base 31: mod_base = OTHER; note = 2'-O-methyl modified nucleotide
  modified_base 32: mod_base = OTHER; note = 2'-O-methyl modified nucleotide
  modified_base 33: mod_base = OTHER; note = 2'-O-methyl modified nucleotide
  modified_base 34: mod_base = OTHER; note = 2'-O-methyl modified nucleotide
  modified_base 35: mod_base = OTHER; note = 2'-O-methyl modified nucleotide
  modified_base 36: mod_base = OTHER; note = 2'-O-methyl modified nucleotide

SEQ ID NO: 1631 - RNA, 36 nt, synthetic construct; identical to SEQ ID NO: 1561
  source 1..36: mol_type = other RNA
  modified_base 1: mod_base = OTHER; note = 2'-O-methyl modified nucleotide with phosphorothioate linkage
  modified_base 2: mod_base = OTHER; note = 2'-O-methyl modified nucleotide
  modified_base 3: mod_base = OTHER; note = 2'-fluoro modified nucleotide
  modified_base 4: mod_base = OTHER; note = 2'-O-methyl modified nucleotide
  modified_base 5: mod_base = OTHER; note = 2'-fluoro modified nucleotide
  modified_base 6: mod_base = OTHER; note = 2'-O-methyl modified nucleotide
  modified_base 7: mod_base = OTHER; note = 2'-O-methyl modified nucleotide
  modified_base 8: mod_base = OTHER; note = 2'-fluoro modified nucleotide
  modified_base 9: mod_base = OTHER; note = 2'-O-methyl modified nucleotide
  modified_base 10: mod_base = OTHER; note = 2'-fluoro modified nucleotide
  modified_base 11: mod_base = OTHER; note = 2'-O-methyl modified nucleotide
  modified_base 12: mod_base = OTHER; note = 2'-fluoro modified nucleotide
  modified_base 13: mod_base = OTHER; note = 2'-fluoro modified nucleotide
  modified_base 14: mod_base = OTHER; note = 2'-O-methyl modified nucleotide
  modified_base 15: mod_base = OTHER; note = 2'-fluoro modified nucleotide
  modified_base 16: mod_base = OTHER; note = 2'-O-methyl modified nucleotide
  modified_base 17: mod_base = OTHER; note = 2'-fluoro modified nucleotide
  modified_base 18: mod_base = OTHER; note = 2'-O-methyl modified nucleotide
  modified_base 19: mod_base = OTHER; note = 2'-O-methyl modified nucleotide
  modified_base 20: mod_base = OTHER; note = 2'-O-methyl modified nucleotide
  modified_base 21: mod_base = OTHER; note = 2'-O-methyl modified nucleotide
  modified_base 22: mod_base = OTHER; note = 2'-O-methyl modified nucleotide
  modified_base 23: mod_base = OTHER; note = 2'-O-methyl modified nucleotide
  modified_base 24: mod_base = OTHER; note = 2'-O-methyl modified nucleotide
  modified_base 25: mod_base = OTHER; note = 2'-O-methyl modified nucleotide
  modified_base 26: mod_base = OTHER; note = 2'-O-methyl modified nucleotide
  modified_base 27: mod_base = OTHER; note = 2'-O-methyl modified nucleotide
  modified_base 28: mod_base = OTHER; note 2'-aminodiethoxymethanol-Adenine-N-Acetylgalactosamine
  modified_base 29: mod_base = OTHER; note 2'-aminodiethoxymethanol-Adenine-N-Acetylgalactosamine
  modified_base 30: mod_base = OTHER; note 2'-aminodiethoxymethanol-Adenine-N-Acetylgalactosamine
  modified_base 31: mod_base = OTHER; note = 2'-O-methyl modified nucleotide
  modified_base 32: mod_base = OTHER; note = 2'-O-methyl modified nucleotide
  modified_base 33: mod_base = OTHER; note = 2'-O-methyl modified nucleotide
  modified_base 34: mod_base = OTHER; note = 2'-O-methyl modified nucleotide
  modified_base 35: mod_base = OTHER; note = 2'-O-methyl modified nucleotide
  modified_base 36: mod_base = OTHER; note = 2'-O-methyl modified nucleotide

SEQ ID NO: 1632 - RNA, 36 nt, synthetic construct; identical to SEQ ID NO: 1562
  source 1..36: mol_type = other RNA
  modified_base 1: mod_base = OTHER; note = 2'-O-methyl modified nucleotide with phosphorothioate linkage
  modified_base 2: mod_base = OTHER; note = 2'-O-methyl modified nucleotide
  modified_base 3: mod_base = OTHER; note = 2'-fluoro modified nucleotide
  modified_base 4: mod_base = OTHER; note = 2'-O-methyl modified nucleotide
  modified_base 5: mod_base = OTHER; note = 2'-fluoro modified nucleotide
  modified_base 6: mod_base = OTHER; note = 2'-O-methyl modified nucleotide
  modified_base 7: mod_base = OTHER; note = 2'-O-methyl modified nucleotide
  modified_base 8: mod_base = OTHER; note = 2'-fluoro modified nucleotide
  modified_base 9: mod_base = OTHER; note = 2'-O-methyl modified nucleotide
  modified_base 10: mod_base = OTHER; note = 2'-fluoro modified nucleotide
  modified_base 11: mod_base = OTHER; note = 2'-O-methyl modified nucleotide
  modified_base 12: mod_base = OTHER; note = 2'-fluoro modified nucleotide
  modified_base 13: mod_base = OTHER; note = 2'-fluoro modified nucleotide
  modified_base 14: mod_base = OTHER; note = 2'-O-methyl modified nucleotide
  modified_base 15: mod_base = OTHER; note = 2'-fluoro modified nucleotide
  modified_base 16: mod_base = OTHER; note = 2'-O-methyl modified nucleotide
  modified_base 17: mod_base = OTHER; note = 2'-fluoro modified nucleotide
  modified_base 18: mod_base = OTHER; note = 2'-O-methyl modified nucleotide
  modified_base 19: mod_base = OTHER; note = 2'-O-methyl modified nucleotide
  modified_base 20: mod_base = OTHER; note = 2'-O-methyl modified nucleotide
  modified_base 21: mod_base = OTHER; note = 2'-O-methyl modified nucleotide
  modified_base 22: mod_base = OTHER; note = 2'-O-methyl modified nucleotide
  modified_base 23: mod_base = OTHER; note = 2'-O-methyl modified nucleotide
  modified_base 24: mod_base = OTHER; note = 2'-O-methyl modified nucleotide
  modified_base 25: mod_base = OTHER; note = 2'-O-methyl modified nucleotide
  modified_base 26: mod_base = OTHER; note = 2'-O-methyl modified nucleotide
  modified_base 27: mod_base = OTHER; note = 2'-O-methyl modified nucleotide
  modified_base 28: mod_base = OTHER; note 2'-aminodiethoxymethanol-Adenine-N-Acetylgalactosamine
  modified_base 29: mod_base = OTHER; note 2'-aminodiethoxymethanol-Adenine-N-Acetylgalactosamine
  modified_base 30: mod_base = OTHER; note 2'-aminodiethoxymethanol-Adenine-N-Acetylgalactosamine
  modified_base 31: mod_base = OTHER; note = 2'-O-methyl modified nucleotide
  modified_base 32: mod_base = OTHER; note = 2'-O-methyl modified nucleotide
  modified_base 33: mod_base = OTHER; note = 2'-O-methyl modified nucleotide
  modified_base 34: mod_base = OTHER; note = 2'-O-methyl modified nucleotide
  modified_base 35: mod_base = OTHER; note = 2'-O-methyl modified nucleotide
  modified_base 36: mod_base = OTHER; note = 2'-O-methyl modified nucleotide

SEQ ID NO: 1633 - RNA, 36 nt, synthetic construct; identical to SEQ ID NO: 1563
  source 1..36: mol_type = other RNA
  modified_base 1: mod_base = OTHER; note = 2'-O-methyl modified nucleotide with phosphorothioate linkage
  modified_base 2: mod_base = OTHER; note = 2'-O-methyl modified nucleotide
  modified_base 3: mod_base = OTHER; note = 2'-fluoro modified nucleotide
  modified_base 4: mod_base = OTHER; note = 2'-O-methyl modified nucleotide
  modified_base 5: mod_base = OTHER; note = 2'-fluoro modified nucleotide
  modified_base 6: mod_base = OTHER; note = 2'-O-methyl modified nucleotide
  modified_base 7: mod_base = OTHER; note = 2'-O-methyl modified nucleotide
  modified_base 8: mod_base = OTHER; note = 2'-fluoro modified nucleotide
  modified_base 9: mod_base = OTHER; note = 2'-O-methyl modified nucleotide
  modified_base 10: mod_base = OTHER; note = 2'-fluoro modified nucleotide
  modified_base 11: mod_base = OTHER; note = 2'-O-methyl modified nucleotide
  modified_base 12: mod_base = OTHER; note = 2'-fluoro modified nucleotide
  modified_base 13: mod_base = OTHER; note = 2'-fluoro modified nucleotide
  modified_base 14: mod_base = OTHER; note = 2'-O-methyl modified nucleotide
  modified_base 15: mod_base = OTHER; note = 2'-fluoro modified nucleotide
  modified_base 16: mod_base = OTHER; note = 2'-O-methyl modified nucleotide
  modified_base 17: mod_base = OTHER; note = 2'-fluoro modified nucleotide
  modified_base 18: mod_base = OTHER; note = 2'-O-methyl modified nucleotide
  modified_base 19: mod_base = OTHER; note = 2'-O-methyl modified nucleotide
  modified_base 20: mod_base = OTHER; note = 2'-O-methyl modified nucleotide
  modified_base 21: mod_base = OTHER; note = 2'-O-methyl modified nucleotide
  modified_base 22: mod_base = OTHER; note = 2'-O-methyl modified nucleotide
  modified_base 23: mod_base = OTHER; note = 2'-O-methyl modified nucleotide
  modified_base 24: mod_base = OTHER; note = 2'-O-methyl modified nucleotide
  modified_base 25: mod_base = OTHER; note = 2'-O-methyl modified nucleotide
  modified_base 26: mod_base = OTHER; note = 2'-O-methyl modified nucleotide
  modified_base 27: mod_base = OTHER; note = 2'-O-methyl modified nucleotide
  modified_base 28: mod_base = OTHER; note 2'-aminodiethoxymethanol-Adenine-N-Acetylgalactosamine
  modified_base 29: mod_base = OTHER; note 2'-aminodiethoxymethanol-Adenine-N-Acetylgalactosamine
  modified_base 30: mod_base = OTHER; note 2'-aminodiethoxymethanol-Adenine-N-Acetylgalactosamine
  modified_base 31: mod_base = OTHER; note = 2'-O-methyl modified nucleotide
  modified_base 32: mod_base = OTHER; note = 2'-O-methyl modified nucleotide
  modified_base 33: mod_base = OTHER; note = 2'-O-methyl modified nucleotide
  modified_base 34: mod_base = OTHER; note = 2'-O-methyl modified nucleotide
  modified_base 35: mod_base = OTHER; note = 2'-O-methyl modified nucleotide
  modified_base 36: mod_base = OTHER; note = 2'-O-methyl modified nucleotide

SEQ ID NO: 1634 - RNA, 36 nt, synthetic construct; identical to SEQ ID NO: 1564
  source 1..36: mol_type = other RNA
  modified_base 1: mod_base = OTHER; note = 2'-O-methyl modified nucleotide with phosphorothioate linkage
  modified_base 2: mod_base = OTHER; note = 2'-O-methyl modified nucleotide
  modified_base 3: mod_base = OTHER; note = 2'-fluoro modified nucleotide
  modified_base 4: mod_base = OTHER; note = 2'-O-methyl modified nucleotide
  modified_base 5: mod_base = OTHER; note = 2'-fluoro modified nucleotide
  modified_base 6: mod_base = OTHER; note = 2'-O-methyl modified nucleotide
  modified_base 7: mod_base = OTHER; note = 2'-O-methyl modified nucleotide
  modified_base 8: mod_base = OTHER; note = 2'-fluoro modified nucleotide
  modified_base 9: mod_base = OTHER; note = 2'-O-methyl modified nucleotide
  modified_base 10: mod_base = OTHER; note = 2'-fluoro modified nucleotide
  modified_base 11: mod_base = OTHER; note = 2'-O-methyl modified nucleotide
  modified_base 12: mod_base = OTHER; note = 2'-fluoro modified nucleotide
  modified_base 13: mod_base = OTHER; note = 2'-fluoro modified nucleotide
  modified_base 14: mod_base = OTHER; note = 2'-O-methyl modified nucleotide
  modified_base 15: mod_base = OTHER; note = 2'-fluoro modified nucleotide
  modified_base 16: mod_base = OTHER; note = 2'-O-methyl modified nucleotide
  modified_base 17: mod_base = OTHER; note = 2'-fluoro modified nucleotide
  modified_base 18: mod_base = OTHER; note = 2'-O-methyl modified nucleotide
  modified_base 19: mod_base = OTHER; note = 2'-O-methyl modified nucleotide
  modified_base 20: mod_base = OTHER; note = 2'-O-methyl modified nucleotide
  modified_base 21: mod_base = OTHER; note = 2'-O-methyl modified nucleotide
  modified_base 22: mod_base = OTHER; note = 2'-O-methyl modified nucleotide
  modified_base 23: mod_base = OTHER; note = 2'-O-methyl modified nucleotide
  modified_base 24: mod_base = OTHER; note = 2'-O-methyl modified nucleotide
  modified_base 25: mod_base = OTHER; note = 2'-O-methyl modified nucleotide
  modified_base 26: mod_base = OTHER; note = 2'-O-methyl modified nucleotide
  modified_base 27: mod_base = OTHER; note = 2'-O-methyl modified nucleotide
  modified_base 28: mod_base = OTHER; note 2'-aminodiethoxymethanol-Adenine-N-Acetylgalactosamine
  modified_base 29: mod_base = OTHER; note 2'-aminodiethoxymethanol-Adenine-N-Acetylgalactosamine
  modified_base 30: mod_base = OTHER; note 2'-aminodiethoxymethanol-Adenine-N-Acetylgalactosamine
  modified_base 31: mod_base = OTHER; note = 2'-O-methyl modified nucleotide
  modified_base 32: mod_base = OTHER; note = 2'-O-methyl modified nucleotide
  modified_base 33: mod_base = OTHER; note = 2'-O-methyl modified nucleotide
  modified_base 34: mod_base = OTHER; note = 2'-O-methyl modified nucleotide
  modified_base 35: mod_base = OTHER; note = 2'-O-methyl modified nucleotide
  modified_base 36: mod_base = OTHER; note = 2'-O-methyl modified nucleotide

SEQ ID NO: 1635 - RNA, 36 nt, synthetic construct; identical to SEQ ID NO: 1565
  source 1..36: mol_type = other RNA
  modified_base 1: mod_base = OTHER; note = 2'-O-methyl modified nucleotide with phosphorothioate linkage
  modified_base 2: mod_base = OTHER; note = 2'-O-methyl modified nucleotide
  modified_base 3: mod_base = OTHER; note = 2'-fluoro modified nucleotide
  modified_base 4: mod_base = OTHER; note = 2'-O-methyl modified nucleotide
  modified_base 5: mod_base = OTHER; note = 2'-fluoro modified nucleotide
  modified_base 6: mod_base = OTHER; note = 2'-O-methyl modified nucleotide
  modified_base 7: mod_base = OTHER; note = 2'-O-methyl modified nucleotide
  modified_base 8: mod_base = OTHER; note = 2'-fluoro modified nucleotide
  modified_base 9: mod_base = OTHER; note = 2'-O-methyl modified nucleotide
  modified_base 10: mod_base = OTHER; note = 2'-fluoro modified nucleotide
  modified_base 11: mod_base = OTHER; note = 2'-O-methyl modified nucleotide
  modified_base 12: mod_base = OTHER; note = 2'-fluoro modified nucleotide
  modified_base 13: mod_base = OTHER; note = 2'-fluoro modified nucleotide
  modified_base 14: mod_base = OTHER; note = 2'-O-methyl modified nucleotide
  modified_base 15: mod_base = OTHER; note = 2'-fluoro modified nucleotide
  modified_base 16: mod_base = OTHER; note = 2'-O-methyl modified nucleotide
  modified_base 17: mod_base = OTHER; note = 2'-fluoro modified nucleotide
  modified_base 18: mod_base = OTHER; note = 2'-O-methyl modified nucleotide
  modified_base 19: mod_base = OTHER; note = 2'-O-methyl modified nucleotide
  modified_base 20: mod_base = OTHER; note = 2'-O-methyl modified nucleotide
  modified_base 21: mod_base = OTHER; note = 2'-O-methyl modified nucleotide
  modified_base 22: mod_base = OTHER; note = 2'-O-methyl modified nucleotide
  modified_base 23: mod_base = OTHER; note = 2'-O-methyl modified nucleotide
  modified_base 24: mod_base = OTHER; note = 2'-O-methyl modified nucleotide
  modified_base 25: mod_base = OTHER; note = 2'-O-methyl modified nucleotide
  modified_base 26: mod_base = OTHER; note = 2'-O-methyl modified nucleotide
  modified_base 27: mod_base = OTHER; note = 2'-O-methyl modified nucleotide
  modified_base 28: mod_base = OTHER; note 2'-aminodiethoxymethanol-Adenine-N-Acetylgalactosamine
  modified_base 29: mod_base = OTHER; note 2'-aminodiethoxymethanol-Adenine-N-Acetylgalactosamine
  modified_base 30: mod_base = OTHER; note 2'-aminodiethoxymethanol-Adenine-N-Acetylgalactosamine
  modified_base 31: mod_base = OTHER; note = 2'-O-methyl modified nucleotide
  modified_base 32: mod_base = OTHER; note = 2'-O-methyl modified nucleotide
  modified_base 33: mod_base = OTHER; note = 2'-O-methyl modified nucleotide
  modified_base 34: mod_base = OTHER; note = 2'-O-methyl modified nucleotide
  modified_base 35: mod_base = OTHER; note = 2'-O-methyl modified nucleotide
  modified_base 36: mod_base = OTHER; note = 2'-O-methyl modified nucleotide

SEQ ID NO: 1636 - RNA, 36 nt, synthetic construct; identical to SEQ ID NO: 1566
  source 1..36: mol_type = other RNA
  modified_base 1: mod_base = OTHER; note = 2'-O-methyl modified nucleotide with phosphorothioate linkage
  modified_base 2: mod_base = OTHER; note = 2'-O-methyl modified nucleotide
  modified_base 3: mod_base = OTHER; note = 2'-fluoro modified nucleotide
  modified_base 4: mod_base = OTHER; note = 2'-O-methyl modified nucleotide
  modified_base 5: mod_base = OTHER; note = 2'-fluoro modified nucleotide
  modified_base 6: mod_base = OTHER; note = 2'-O-methyl modified nucleotide
  modified_base 7: mod_base = OTHER; note = 2'-O-methyl modified nucleotide
  modified_base 8: mod_base = OTHER; note = 2'-fluoro modified nucleotide
  modified_base 9: mod_base = OTHER; note = 2'-O-methyl modified nucleotide
  modified_base 10: mod_base = OTHER; note = 2'-fluoro modified nucleotide
  modified_base 11: mod_base = OTHER; note = 2'-O-methyl modified nucleotide
  modified_base 12: mod_base = OTHER; note = 2'-fluoro modified nucleotide
  modified_base 13: mod_base = OTHER; note = 2'-fluoro modified nucleotide
  modified_base 14: mod_base = OTHER; note = 2'-O-methyl modified nucleotide
  modified_base 15: mod_base = OTHER; note = 2'-fluoro modified nucleotide
  modified_base 16: mod_base = OTHER; note = 2'-O-methyl modified nucleotide
  modified_base 17: mod_base = OTHER; note = 2'-fluoro modified nucleotide
  modified_base 18: mod_base = OTHER; note = 2'-O-methyl modified nucleotide
  modified_base 19: mod_base = OTHER; note = 2'-O-methyl modified nucleotide
  modified_base 20: mod_base = OTHER; note = 2'-O-methyl modified nucleotide
  modified_base 21: mod_base = OTHER; note = 2'-O-methyl modified nucleotide
  modified_base 22: mod_base = OTHER; note = 2'-O-methyl modified nucleotide
  modified_base 23: mod_base = OTHER; note = 2'-O-methyl modified nucleotide
  modified_base 24: mod_base = OTHER; note = 2'-O-methyl modified nucleotide
  modified_base 25: mod_base = OTHER; note = 2'-O-methyl modified nucleotide
  modified_base 26: mod_base = OTHER; note = 2'-O-methyl modified nucleotide
  modified_base 27: mod_base = OTHER; note = 2'-O-methyl modified nucleotide
  modified_base 28: mod_base = OTHER; note 2'-aminodiethoxymethanol-Adenine-N-Acetylgalactosamine
  modified_base 29: mod_base = OTHER; note 2'-aminodiethoxymethanol-Adenine-N-Acetylgalactosamine
  modified_base 30: mod_base = OTHER; note 2'-aminodiethoxymethanol-Adenine-N-Acetylgalactosamine
  modified_base 31: mod_base = OTHER; note = 2'-O-methyl modified nucleotide
  modified_base 32: mod_base = OTHER; note = 2'-O-methyl modified nucleotide
  modified_base 33: mod_base = OTHER; note = 2'-O-methyl modified nucleotide
  modified_base 34: mod_base = OTHER; note = 2'-O-methyl modified nucleotide
  modified_base 35: mod_base = OTHER; note = 2'-O-methyl modified nucleotide
  modified_base 36: mod_base = OTHER; note = 2'-O-methyl modified nucleotide

SEQ ID NO: 1637 - RNA, 36 nt, synthetic construct; identical to SEQ ID NO: 1567
  source 1..36: mol_type = other RNA
  modified_base 1: mod_base = OTHER; note = 2'-O-methyl modified nucleotide with phosphorothioate linkage
  modified_base 2: mod_base = OTHER; note = 2'-O-methyl modified nucleotide
  modified_base 3: mod_base = OTHER; note = 2'-fluoro modified nucleotide
  modified_base 4: mod_base = OTHER; note = 2'-O-methyl modified nucleotide
  modified_base 5: mod_base = OTHER; note = 2'-fluoro modified nucleotide
  modified_base 6: mod_base = OTHER; note = 2'-O-methyl modified nucleotide
  modified_base 7: mod_base = OTHER; note = 2'-O-methyl modified nucleotide
  modified_base 8: mod_base = OTHER; note = 2'-fluoro modified nucleotide
  modified_base 9: mod_base = OTHER; note = 2'-O-methyl modified nucleotide
  modified_base 10: mod_base = OTHER; note = 2'-fluoro modified nucleotide
  modified_base 11: mod_base = OTHER; note = 2'-O-methyl modified nucleotide
  modified_base 12: mod_base = OTHER; note = 2'-fluoro modified nucleotide
  modified_base 13: mod_base = OTHER; note = 2'-fluoro modified nucleotide
  modified_base 14: mod_base = OTHER; note = 2'-O-methyl modified nucleotide
  modified_base 15: mod_base = OTHER; note = 2'-fluoro modified nucleotide
  modified_base 16: mod_base = OTHER; note = 2'-O-methyl modified nucleotide
  modified_base 17: mod_base = OTHER; note = 2'-fluoro modified nucleotide
  modified_base 18: mod_base = OTHER; note = 2'-O-methyl modified nucleotide
  modified_base 19: mod_base = OTHER; note = 2'-O-methyl modified nucleotide
  modified_base 20: mod_base = OTHER; note = 2'-O-methyl modified nucleotide
  modified_base 21: mod_base = OTHER; note = 2'-O-methyl modified nucleotide
  modified_base 22: mod_base = OTHER; note = 2'-O-methyl modified nucleotide
  modified_base 23: mod_base = OTHER; note = 2'-O-methyl modified nucleotide
  modified_base 24: mod_base = OTHER; note = 2'-O-methyl modified nucleotide
  modified_base 25: mod_base = OTHER; note = 2'-O-methyl modified nucleotide
  modified_base 26: mod_base = OTHER; note = 2'-O-methyl modified nucleotide
  modified_base 27: mod_base = OTHER; note = 2'-O-methyl modified nucleotide
  modified_base 28: mod_base = OTHER; note 2'-aminodiethoxymethanol-Adenine-N-Acetylgalactosamine
  modified_base 29: mod_base = OTHER; note 2'-aminodiethoxymethanol-Adenine-N-Acetylgalactosamine
  modified_base 30: mod_base = OTHER; note 2'-aminodiethoxymethanol-Adenine-N-Acetylgalactosamine
  modified_base 31: mod_base = OTHER; note = 2'-O-methyl modified nucleotide
  modified_base 32: mod_base = OTHER; note = 2'-O-methyl modified nucleotide
  modified_base 33: mod_base = OTHER; note = 2'-O-methyl modified nucleotide
  modified_base 34: mod_base = OTHER; note = 2'-O-methyl modified nucleotide
  modified_base 35: mod_base = OTHER; note = 2'-O-methyl modified nucleotide
  modified_base 36: mod_base = OTHER; note = 2'-O-methyl modified nucleotide

SEQ ID NO: 1638 - RNA, 36 nt, synthetic construct; identical to SEQ ID NO: 1568
  source 1..36: mol_type = other RNA
  modified_base 1: mod_base = OTHER; note = 2'-O-methyl modified nucleotide with phosphorothioate linkage
  modified_base 2: mod_base = OTHER; note = 2'-O-methyl modified nucleotide
  modified_base 3: mod_base = OTHER; note = 2'-fluoro modified nucleotide
  modified_base 4: mod_base = OTHER; note = 2'-O-methyl modified nucleotide
  modified_base 5: mod_base = OTHER; note = 2'-fluoro modified nucleotide
  modified_base 6: mod_base = OTHER; note = 2'-O-methyl modified nucleotide
  modified_base 7: mod_base = OTHER; note = 2'-O-methyl modified nucleotide
  modified_base 8: mod_base = OTHER; note = 2'-fluoro modified nucleotide
  modified_base 9: mod_base = OTHER; note = 2'-O-methyl modified nucleotide
  modified_base 10: mod_base = OTHER; note = 2'-fluoro modified nucleotide
  modified_base 11: mod_base = OTHER; note = 2'-O-methyl modified nucleotide
  modified_base 12: mod_base = OTHER; note = 2'-fluoro modified nucleotide
  modified_base 13: mod_base = OTHER; note = 2'-fluoro modified nucleotide
  modified_base 14: mod_base = OTHER; note = 2'-O-methyl modified nucleotide
  modified_base 15: mod_base = OTHER; note = 2'-fluoro modified nucleotide
  modified_base 16: mod_base = OTHER; note = 2'-O-methyl modified nucleotide
  modified_base 17: mod_base = OTHER; note = 2'-fluoro modified nucleotide
  modified_base 18: mod_base = OTHER; note = 2'-O-methyl modified nucleotide
  modified_base 19: mod_base = OTHER; note = 2'-O-methyl modified nucleotide
  modified_base 20: mod_base = OTHER; note = 2'-O-methyl modified nucleotide
  modified_base 21: mod_base = OTHER; note = 2'-O-methyl modified nucleotide
  modified_base 22: mod_base = OTHER; note = 2'-O-methyl modified nucleotide
  modified_base 23: mod_base = OTHER; note = 2'-O-methyl modified nucleotide
  modified_base 24: mod_base = OTHER; note = 2'-O-methyl modified nucleotide
  modified_base 25: mod_base = OTHER; note = 2'-O-methyl modified nucleotide
  modified_base 26: mod_base = OTHER; note = 2'-O-methyl modified nucleotide
  modified_base 27: mod_base = OTHER; note = 2'-O-methyl modified nucleotide
  modified_base 28: mod_base = OTHER; note 2'-aminodiethoxymethanol-Adenine-N-Acetylgalactosamine
  modified_base 29: mod_base = OTHER; note 2'-aminodiethoxymethanol-Adenine-N-Acetylgalactosamine
  modified_base 30: mod_base = OTHER; note 2'-aminodiethoxymethanol-Adenine-N-Acetylgalactosamine
  modified_base 31: mod_base = OTHER; note = 2'-O-methyl modified nucleotide
  modified_base 32: mod_base = OTHER; note = 2'-O-methyl modified nucleotide
  modified_base 33: mod_base = OTHER; note = 2'-O-methyl modified nucleotide
  modified_base 34: mod_base = OTHER; note = 2'-O-methyl modified nucleotide
  modified_base 35: mod_base = OTHER; note = 2'-O-methyl modified nucleotide
  modified_base 36: mod_base = OTHER; note = 2'-O-methyl modified nucleotide

SEQ ID NO: 1639 - RNA, 36 nt, synthetic construct; identical to SEQ ID NO: 1569
  source 1..36: mol_type = other RNA
  modified_base 1: mod_base = OTHER; note = 2'-O-methyl modified nucleotide with phosphorothioate linkage
  modified_base 2: mod_base = OTHER; note = 2'-O-methyl modified nucleotide
  modified_base 3: mod_base = OTHER; note = 2'-fluoro modified nucleotide
  modified_base 4: mod_base = OTHER; note = 2'-O-methyl modified nucleotide
  modified_base 5: mod_base = OTHER; note = 2'-fluoro modified nucleotide
  modified_base 6: mod_base = OTHER; note = 2'-O-methyl modified nucleotide
  modified_base 7: mod_base = OTHER; note = 2'-O-methyl modified nucleotide
  modified_base 8: mod_base = OTHER; note = 2'-fluoro modified nucleotide
  modified_base 9: mod_base = OTHER; note = 2'-O-methyl modified nucleotide
  modified_base 10: mod_base = OTHER; note = 2'-fluoro modified nucleotide
  modified_base 11: mod_base = OTHER; note = 2'-O-methyl modified nucleotide
  modified_base 12: mod_base = OTHER; note = 2'-fluoro modified nucleotide
  modified_base 13: mod_base = OTHER; note = 2'-fluoro modified nucleotide
  modified_base 14: mod_base = OTHER; note = 2'-O-methyl modified nucleotide
  modified_base 15: mod_base = OTHER; note = 2'-fluoro modified nucleotide
  modified_base 16: mod_base = OTHER; note = 2'-O-methyl modified nucleotide
  modified_base 17: mod_base = OTHER; note = 2'-fluoro modified nucleotide
  modified_base 18: mod_base = OTHER; note = 2'-O-methyl modified nucleotide
  modified_base 19: mod_base = OTHER; note = 2'-O-methyl modified nucleotide
  modified_base 20: mod_base = OTHER; note = 2'-O-methyl modified nucleotide
  modified_base 21: mod_base = OTHER; note = 2'-O-methyl modified nucleotide
  modified_base 22: mod_base = OTHER; note = 2'-O-methyl modified nucleotide
  modified_base 23: mod_base = OTHER; note = 2'-O-methyl modified nucleotide
  modified_base 24: mod_base = OTHER; note = 2'-O-methyl modified nucleotide
  modified_base 25: mod_base = OTHER; note = 2'-O-methyl modified nucleotide
  modified_base 26: mod_base = OTHER; note = 2'-O-methyl modified nucleotide
  modified_base 27: mod_base = OTHER; note = 2'-O-methyl modified nucleotide
  modified_base 28: mod_base = OTHER; note 2'-aminodiethoxymethanol-Adenine-N-Acetylgalactosamine
  modified_base 29: mod_base = OTHER; note 2'-aminodiethoxymethanol-Adenine-N-Acetylgalactosamine
  modified_base 30: mod_base = OTHER; note 2'-aminodiethoxymethanol-Adenine-N-Acetylgalactosamine
  modified_base 31: mod_base = OTHER; note = 2'-O-methyl modified nucleotide
  modified_base 32: mod_base = OTHER; note = 2'-O-methyl modified nucleotide
  modified_base 33: mod_base = OTHER; note = 2'-O-methyl modified nucleotide
  modified_base 34: mod_base = OTHER; note = 2'-O-methyl modified nucleotide
  modified_base 35: mod_base = OTHER; note = 2'-O-methyl modified nucleotide
  modified_base 36: mod_base = OTHER; note = 2'-O-methyl modified nucleotide

SEQ ID NO: 1640 - RNA, 36 nt, synthetic construct; identical to SEQ ID NO: 1570
  source 1..36: mol_type = other RNA
  modified_base 1: mod_base = OTHER; note = 2'-O-methyl modified nucleotide with phosphorothioate linkage
  modified_base 2: mod_base = OTHER; note = 2'-O-methyl modified nucleotide
  modified_base 3: mod_base = OTHER; note = 2'-fluoro modified nucleotide
  modified_base 4: mod_base = OTHER; note = 2'-O-methyl modified nucleotide
  modified_base 5: mod_base = OTHER; note = 2'-fluoro modified nucleotide
  modified_base 6: mod_base = OTHER; note = 2'-O-methyl modified nucleotide
  modified_base 7: mod_base = OTHER; note = 2'-O-methyl modified nucleotide
  modified_base 8: mod_base = OTHER; note = 2'-fluoro modified nucleotide
  modified_base 9: mod_base = OTHER; note = 2'-O-methyl modified nucleotide
  modified_base 10: mod_base = OTHER; note = 2'-fluoro modified nucleotide
  modified_base 11: mod_base = OTHER; note = 2'-O-methyl modified nucleotide
  modified_base 12: mod_base = OTHER; note = 2'-fluoro modified nucleotide
  modified_base 13: mod_base = OTHER; note = 2'-fluoro modified nucleotide
  modified_base 14: mod_base = OTHER; note = 2'-O-methyl modified nucleotide
  modified_base 15: mod_base = OTHER; note = 2'-fluoro modified nucleotide
  modified_base 16: mod_base = OTHER; note = 2'-O-methyl modified nucleotide
  modified_base 17: mod_base = OTHER; note = 2'-fluoro modified nucleotide
  modified_base 18: mod_base = OTHER; note = 2'-O-methyl modified nucleotide
  modified_base 19: mod_base = OTHER; note = 2'-O-methyl modified nucleotide
  modified_base 20: mod_base = OTHER; note = 2'-O-methyl modified nucleotide
  modified_base 21: mod_base = OTHER; note = 2'-O-methyl modified nucleotide
  modified_base 22: mod_base = OTHER; note = 2'-O-methyl modified nucleotide
  modified_base 23: mod_base = OTHER; note = 2'-O-methyl modified nucleotide
  modified_base 24: mod_base = OTHER; note = 2'-O-methyl modified nucleotide
  modified_base 25: mod_base = OTHER; note = 2'-O-methyl modified nucleotide
  modified_base 26: mod_base = OTHER; note = 2'-O-methyl modified nucleotide
  modified_base 27: mod_base = OTHER; note = 2'-O-methyl modified nucleotide
  modified_base 28: mod_base = OTHER; note 2'-aminodiethoxymethanol-Adenine-N-Acetylgalactosamine
  modified_base 29: mod_base = OTHER; note 2'-aminodiethoxymethanol-Adenine-N-Acetylgalactosamine
  modified_base 30: mod_base = OTHER; note 2'-aminodiethoxymethanol-Adenine-N-Acetylgalactosamine
  modified_base 31: mod_base = OTHER; note = 2'-O-methyl modified nucleotide
  modified_base 32: mod_base = OTHER; note = 2'-O-methyl modified nucleotide
  modified_base 33: mod_base = OTHER; note = 2'-O-methyl modified nucleotide
  modified_base 34: mod_base = OTHER; note = 2'-O-methyl modified nucleotide
  modified_base 35: mod_base = OTHER; note = 2'-O-methyl modified nucleotide
  modified_base 36: mod_base = OTHER; note = 2'-O-methyl modified nucleotide

SEQ ID NO: 1641 - RNA, 36 nt, synthetic construct; identical to SEQ ID NO: 1571
  source 1..36: mol_type = other RNA
  modified_base 1: mod_base = OTHER; note = 2'-O-methyl modified nucleotide with phosphorothioate linkage
  modified_base 2: mod_base = OTHER; note = 2'-O-methyl modified nucleotide
  modified_base 3: mod_base = OTHER; note = 2'-fluoro modified nucleotide
  modified_base 4: mod_base = OTHER; note = 2'-O-methyl modified nucleotide
  modified_base 5: mod_base = OTHER; note = 2'-fluoro modified nucleotide
  modified_base 6: mod_base = OTHER; note = 2'-O-methyl modified nucleotide
  modified_base 7: mod_base = OTHER; note = 2'-O-methyl modified nucleotide
  modified_base 8: mod_base = OTHER; note = 2'-fluoro modified nucleotide
  modified_base 9: mod_base = OTHER; note = 2'-O-methyl modified nucleotide
  modified_base 10: mod_base = OTHER; note = 2'-fluoro modified nucleotide
  modified_base 11: mod_base = OTHER; note = 2'-O-methyl modified nucleotide
  modified_base 12: mod_base = OTHER; note = 2'-fluoro modified nucleotide
  modified_base 13: mod_base = OTHER; note = 2'-fluoro modified nucleotide
  modified_base 14: mod_base = OTHER; note = 2'-O-methyl modified nucleotide
  modified_base 15: mod_base = OTHER; note = 2'-fluoro modified nucleotide
  modified_base 16: mod_base = OTHER; note = 2'-O-methyl modified nucleotide
  modified_base 17: mod_base = OTHER; note = 2'-fluoro modified nucleotide
  modified_base 18: mod_base = OTHER; note = 2'-O-methyl modified nucleotide
  modified_base 19: mod_base = OTHER; note = 2'-O-methyl modified nucleotide
  modified_base 20: mod_base = OTHER; note = 2'-O-methyl modified nucleotide
  modified_base 21: mod_base = OTHER; note = 2'-O-methyl modified nucleotide
  modified_base 22: mod_base = OTHER; note = 2'-O-methyl modified nucleotide
  modified_base 23: mod_base = OTHER; note = 2'-O-methyl modified nucleotide
  modified_base 24: mod_base = OTHER; note = 2'-O-methyl modified nucleotide
  modified_base 25: mod_base = OTHER; note = 2'-O-methyl modified nucleotide
  modified_base 26: mod_base = OTHER; note = 2'-O-methyl modified nucleotide
  modified_base 27: mod_base = OTHER; note = 2'-O-methyl modified nucleotide
  modified_base 28: mod_base = OTHER; note 2'-aminodiethoxymethanol-Adenine-N-Acetylgalactosamine
  modified_base 29: mod_base = OTHER; note 2'-aminodiethoxymethanol-Adenine-N-Acetylgalactosamine
  modified_base 30: mod_base = OTHER; note 2'-aminodiethoxymethanol-Adenine-N-Acetylgalactosamine
  modified_base 31: mod_base = OTHER; note = 2'-O-methyl modified nucleotide
  modified_base 32: mod_base = OTHER; note = 2'-O-methyl modified nucleotide
  modified_base 33: mod_base = OTHER; note = 2'-O-methyl modified nucleotide
  modified_base 34: mod_base = OTHER; note = 2'-O-methyl modified nucleotide
  modified_base 35: mod_base = OTHER; note = 2'-O-methyl modified nucleotide
  modified_base 36: mod_base = OTHER; note = 2'-O-methyl modified nucleotide

SEQ ID NO: 1642 - RNA, 22 nt, synthetic construct
  source 1..22: mol_type = other RNA
  modified_base 1: mod_base = OTHER; note = 4'-O-monomethylphosphonate-2'-O-methyl uridine phosphorothioate
  modified_base 2: mod_base = OTHER; note = 2'-fluoro modified nucleotide with phosphorothioate linkage
  modified_base 3: mod_base = OTHER; note = 2'-fluoro modified nucleotide
  modified_base 4: mod_base = OTHER; note = 2'-fluoro modified nucleotide
  modified_base 5: mod_base = OTHER; note = 2'-fluoro modified nucleotide
  modified_base 6: mod_base = OTHER; note = 2'-O-methyl modified nucleotide
  modified_base 7: mod_base = OTHER; note = 2'-fluoro modified nucleotide
  modified_base 8: mod_base = OTHER; note = 2'-O-methyl modified nucleotide
  modified_base 9: mod_base = OTHER; note = 2'-O-methyl modified nucleotide
  modified_base 10: mod_base = OTHER; note = 2'-fluoro modified nucleotide
  modified_base 11: mod_base = OTHER; note = 2'-O-methyl modified nucleotide
  modified_base 12: mod_base = OTHER; note = 2'-O-methyl modified nucleotide
  modified_base 13: mod_base = OTHER; note = 2'-O-methyl modified nucleotide
  modified_base 14: mod_base = OTHER; note = 2'-fluoro modified nucleotide
  modified_base 15: mod_base = OTHER; note = 2'-O-methyl modified nucleotide
  modified_base 16: mod_base = OTHER; note = 2'-fluoro modified nucleotide
  modified_base 17: mod_base = OTHER; note = 2'-O-methyl modified nucleotide
  modified_base 18: mod_base = OTHER; note = 2'-O-methyl modified nucleotide
  modified_base 19: mod_base = OTHER; note = 2'-fluoro modified nucleotide
  modified_base 20: mod_base = OTHER; note = 2'-O-methyl modified nucleotide with phosphorothioate linkage
  modified_base 21: mod_base = OTHER; note = 2'-O-methyl modified nucleotide with phosphorothioate linkage
  modified_base 22: mod_base = OTHER; note = 2'-O-methyl modified nucleotide
taatgaattcctttacaccagg

SEQ ID NO: 1643 - RNA, 22 nt, synthetic construct
  source 1..22: mol_type = other RNA
  modified_base 1: mod_base = OTHER; note = 4'-O-monomethylphosphonate-2'-O-methyl uridine phosphorothioate
  modified_base 2: mod_base = OTHER; note = 2'-fluoro modified nucleotide with phosphorothioate linkage
  modified_base 3: mod_base = OTHER; note = 2'-fluoro modified nucleotide
  modified_base 4: mod_base = OTHER; note = 2'-fluoro modified nucleotide
  modified_base 5: mod_base = OTHER; note = 2'-fluoro modified nucleotide
  modified_base 6: mod_base = OTHER; note = 2'-O-methyl modified nucleotide
  modified_base 7: mod_base = OTHER; note = 2'-fluoro modified nucleotide
  modified_base 8: mod_base = OTHER; note = 2'-O-methyl modified nucleotide
  modified_base 9: mod_base = OTHER; note = 2'-O-methyl modified nucleotide
  modified_base 10: mod_base = OTHER; note = 2'-fluoro modified nucleotide
  modified_base 11: mod_base = OTHER; note = 2'-O-methyl modified nucleotide
  modified_base 12: mod_base = OTHER; note = 2'-O-methyl modified nucleotide
  modified_base 13: mod_base = OTHER; note = 2'-O-methyl modified nucleotide
  modified_base 14: mod_base = OTHER; note = 2'-fluoro modified nucleotide
  modified_base 15: mod_base = OTHER; note = 2'-O-methyl modified nucleotide
  modified_base 16: mod_base = OTHER; note = 2'-fluoro modified nucleotide
  modified_base 17: mod_base = OTHER; note = 2'-O-methyl modified nucleotide
  modified_base 18: mod_base = OTHER; note = 2'-O-methyl modified nucleotide
  modified_base 19: mod_base = OTHER; note = 2'-fluoro modified nucleotide
  modified_base 20: mod_base = OTHER; note = 2'-O-methyl modified nucleotide with phosphorothioate linkage
  modified_base 21: mod_base = OTHER; note = 2'-O-methyl modified nucleotide with phosphorothioate linkage
  modified_base 22: mod_base = OTHER; note = 2'-O-methyl modified nucleotide
ttaatgaattcctttacaccgg

SEQ ID NO: 1644 - RNA, 22 nt, synthetic construct
  source 1..22: mol_type = other RNA
  modified_base 1: mod_base = OTHER; note = 4'-O-monomethylphosphonate-2'-O-methyl uridine phosphorothioate
  modified_base 2: mod_base = OTHER; note = 2'-fluoro modified nucleotide with phosphorothioate linkage
  modified_base 3: mod_base = OTHER; note = 2'-fluoro modified nucleotide
  modified_base 4: mod_base = OTHER; note = 2'-fluoro modified nucleotide
  modified_base 5: mod_base = OTHER; note = 2'-fluoro modified nucleotide
  modified_base 6: mod_base = OTHER; note = 2'-O-methyl modified nucleotide
  modified_base 7: mod_base = OTHER; note = 2'-fluoro modified nucleotide
  modified_base 8: mod_base = OTHER; note = 2'-O-methyl modified nucleotide
  modified_base 9: mod_base = OTHER; note = 2'-O-methyl modified nucleotide
  modified_base 10: mod_base = OTHER; note = 2'-fluoro modified nucleotide
  modified_base 11: mod_base = OTHER; note = 2'-O-methyl modified nucleotide
  modified_base 12: mod_base = OTHER; note = 2'-O-methyl modified nucleotide
  modified_base 13: mod_base = OTHER; note = 2'-O-methyl modified nucleotide
  modified_base 14: mod_base = OTHER; note = 2'-fluoro modified nucleotide
  modified_base 15: mod_base = OTHER; note = 2'-O-methyl modified nucleotide
  modified_base 16: mod_base = OTHER; note = 2'-fluoro modified nucleotide
  modified_base 17: mod_base = OTHER; note = 2'-O-methyl modified nucleotide
  modified_base 18: mod_base = OTHER; note = 2'-O-methyl modified nucleotide
  modified_base 19: mod_base = OTHER; note = 2'-fluoro modified nucleotide
  modified_base 20: mod_base = OTHER; note = 2'-O-methyl modified nucleotide with phosphorothioate linkage
  modified_base 21: mod_base = OTHER; note = 2'-O-methyl modified nucleotide with phosphorothioate linkage
  modified_base 22: mod_base = OTHER; note = 2'-O-methyl modified nucleotide
taatacatccatggctaatggg

SEQ ID NO: 1645 - RNA, 22 nt, synthetic construct
  source 1..22: mol_type = other RNA
  modified_base 1: mod_base = OTHER; note = 4'-O-monomethylphosphonate-2'-O-methyl uridine phosphorothioate
  modified_base 2: mod_base = OTHER; note = 2'-fluoro modified nucleotide with phosphorothioate linkage
  modified_base 3: mod_base = OTHER; note = 2'-fluoro modified nucleotide
  modified_base 4: mod_base = OTHER; note = 2'-fluoro modified nucleotide
  modified_base 5: mod_base = OTHER; note = 2'-fluoro modified nucleotide
  modified_base 6: mod_base = OTHER; note = 2'-O-methyl modified nucleotide
  modified_base 7: mod_base = OTHER; note = 2'-fluoro modified nucleotide
  modified_base 8: mod_base = OTHER; note = 2'-O-methyl modified nucleotide
  modified_base 9: mod_base = OTHER; note = 2'-O-methyl modified nucleotide
  modified_base 10: mod_base = OTHER; note = 2'-fluoro modified nucleotide
  modified_base 11: mod_base = OTHER; note = 2'-O-methyl modified nucleotide
  modified_base 12: mod_base = OTHER; note = 2'-O-methyl modified nucleotide
  modified_base 13: mod_base = OTHER; note = 2'-O-methyl modified nucleotide
  modified_base 14: mod_base = OTHER; note = 2'-fluoro modified nucleotide
  modified_base 15: mod_base = OTHER; note = 2'-O-methyl modified nucleotide
  modified_base 16: mod_base = OTHER; note = 2'-fluoro modified nucleotide
  modified_base 17: mod_base = OTHER; note = 2'-O-methyl modified nucleotide
  modified_base 18: mod_base = OTHER; note = 2'-O-methyl modified nucleotide
  modified_base 19: mod_base = OTHER; note = 2'-fluoro modified nucleotide
  modified_base 20: mod_base = OTHER; note = 2'-O-methyl modified nucleotide with phosphorothioate linkage
  modified_base 21: mod_base = OTHER; note = 2'-O-methyl modified nucleotide with phosphorothioate linkage
  modified_base 22: mod_base = OTHER; note = 2'-O-methyl modified nucleotide
ttgaatacatccatggctaagg

SEQ ID NO: 1646 - RNA, 22 nt, synthetic construct
  source 1..22: mol_type = other RNA
  modified_base 1: mod_base = OTHER; note = 4'-O-monomethylphosphonate-2'-O-methyl uridine phosphorothioate
  modified_base 2: mod_base = OTHER; note = 2'-fluoro modified nucleotide with phosphorothioate linkage
  modified_base 3: mod_base = OTHER; note = 2'-fluoro modified nucleotide
  modified_base 4: mod_base = OTHER; note = 2'-fluoro modified nucleotide
  modified_base 5: mod_base = OTHER; note = 2'-fluoro modified nucleotide
  modified_base 6: mod_base = OTHER; note = 2'-O-methyl modified nucleotide
  modified_base 7: mod_base = OTHER; note = 2'-fluoro modified nucleotide
  modified_base 8: mod_base = OTHER; note = 2'-O-methyl modified nucleotide
  modified_base 9: mod_base = OTHER; note = 2'-O-methyl modified nucleotide
  modified_base 10: mod_base = OTHER; note = 2'-fluoro modified nucleotide
  modified_base 11: mod_base = OTHER; note = 2'-O-methyl modified nucleotide
  modified_base 12: mod_base = OTHER; note = 2'-O-methyl modified nucleotide
  modified_base 13: mod_base = OTHER; note = 2'-O-methyl modified nucleotide
  modified_base 14: mod_base = OTHER; note = 2'-fluoro modified nucleotide
  modified_base 15: mod_base = OTHER; note = 2'-O-methyl modified nucleotide
  modified_base 16: mod_base = OTHER; note = 2'-fluoro modified nucleotide
  modified_base 17: mod_base = OTHER; note = 2'-O-methyl modified nucleotide
  modified_base 18: mod_base = OTHER; note = 2'-O-methyl modified nucleotide
  modified_base 19: mod_base = OTHER; note = 2'-fluoro modified nucleotide
  modified_base 20: mod_base = OTHER; note = 2'-O-methyl modified nucleotide with phosphorothioate linkage
  modified_base 21: mod_base = OTHER; note = 2'-O-methyl modified nucleotide with phosphorothioate linkage
  modified_base 22: mod_base = OTHER; note = 2'-O-methyl modified nucleotide
tttcatgaatacatccatgggg

SEQ ID NO: 1647 - RNA, 22 nt, synthetic construct
  source 1..22: mol_type = other RNA
  modified_base 1: mod_base = OTHER; note = 4'-O-monomethylphosphonate-2'-O-methyl uridine phosphorothioate
  modified_base 2: mod_base = OTHER; note = 2'-fluoro modified nucleotide with phosphorothioate linkage
  modified_base 3: mod_base = OTHER; note = 2'-fluoro modified nucleotide
  modified_base 4: mod_base = OTHER; note = 2'-fluoro modified nucleotide
  modified_base 5: mod_base = OTHER; note = 2'-fluoro modified nucleotide
  modified_base 6: mod_base = OTHER; note = 2'-O-methyl modified nucleotide
  modified_base 7: mod_base = OTHER; note = 2'-fluoro modified nucleotide
  modified_base 8: mod_base = OTHER; note = 2'-O-methyl modified nucleotide
  modified_base 9: mod_base = OTHER; note = 2'-O-methyl modified nucleotide
  modified_base 10: mod_base = OTHER; note = 2'-fluoro modified nucleotide
  modified_base 11: mod_base = OTHER; note = 2'-O-methyl modified nucleotide
  modified_base 12: mod_base = OTHER; note = 2'-O-methyl modified nucleotide
  modified_base 13: mod_base = OTHER; note = 2'-O-methyl modified nucleotide
  modified_base 14: mod_base = OTHER; note = 2'-fluoro modified nucleotide
  modified_base 15: mod_base = OTHER; note = 2'-O-methyl modified nucleotide
  modified_base 16: mod_base = OTHER; note = 2'-fluoro modified nucleotide
  modified_base 17: mod_base = OTHER; note = 2'-O-methyl modified nucleotide
  modified_base 18: mod_base = OTHER; note = 2'-O-methyl modified nucleotide
  modified_base 19: mod_base = OTHER; note = 2'-fluoro modified nucleotide
  modified_base 20: mod_base = OTHER; note = 2'-O-methyl modified nucleotide with phosphorothioate linkage
  modified_base 21: mod_base = OTHER; note = 2'-O-methyl modified nucleotide with phosphorothioate linkage
  modified_base 22: mod_base = OTHER; note = 2'-O-methyl modified nucleotide
tagtcctttcatgaatacatgg

SEQ ID NO: 1648 - RNA, 22 nt, synthetic construct
  source 1..22: mol_type = other RNA
  modified_base 1: mod_base = OTHER; note = 4'-O-monomethylphosphonate-2'-O-methyl uridine phosphorothioate
  modified_base 2: mod_base = OTHER; note = 2'-fluoro modified nucleotide with phosphorothioate linkage
  modified_base 3: mod_base = OTHER; note = 2'-fluoro modified nucleotide
  modified_base 4: mod_base = OTHER; note = 2'-fluoro modified nucleotide
  modified_base 5: mod_base = OTHER; note = 2'-fluoro modified nucleotide
  modified_base 6: mod_base = OTHER; note = 2'-O-methyl modified nucleotide
  modified_base 7: mod_base = OTHER; note = 2'-fluoro modified nucleotide
  modified_base 8: mod_base = OTHER; note = 2'-O-methyl modified nucleotide
  modified_base 9: mod_base = OTHER; note = 2'-O-methyl modified nucleotide
  modified_base 10: mod_base = OTHER; note = 2'-fluoro modified nucleotide
  modified_base 11: mod_base = OTHER; note = 2'-O-methyl modified nucleotide
  modified_base 12: mod_base = OTHER; note = 2'-O-methyl modified nucleotide
  modified_base 13: mod_base = OTHER; note = 2'-O-methyl modified nucleotide
  modified_base 14: mod_base = OTHER; note = 2'-fluoro modified nucleotide
  modified_base 15: mod_base = OTHER; note = 2'-O-methyl modified nucleotide
  modified_base 16: mod_base = OTHER; note = 2'-fluoro modified nucleotide
  modified_base 17: mod_base = OTHER; note = 2'-O-methyl modified nucleotide
  modified_base 18: mod_base = OTHER; note = 2'-O-methyl modified nucleotide
  modified_base 19: mod_base = OTHER; note = 2'-fluoro modified nucleotide
  modified_base 20: mod_base = OTHER; note = 2'-O-methyl modified nucleotide with phosphorothioate linkage
  modified_base 21: mod_base = OTHER; note = 2'-O-methyl modified nucleotide with phosphorothioate linkage
  modified_base 22: mod_base = OTHER; note = 2'-O-methyl modified nucleotide
taacaccctcttttgtctttgg

SEQ ID NO: 1649 - RNA, 22 nt, synthetic construct
  source 1..22: mol_type = other RNA
  modified_base 1: mod_base = OTHER; note = 4'-O-monomethylphosphonate-2'-O-methyl uridine phosphorothioate
  modified_base 2: mod_base = OTHER; note = 2'-fluoro modified nucleotide with phosphorothioate linkage
  modified_base 3: mod_base = OTHER; note = 2'-fluoro modified nucleotide
  modified_base 4: mod_base = OTHER; note = 2'-fluoro modified nucleotide
  modified_base 5: mod_base = OTHER; note = 2'-fluoro modified nucleotide
  modified_base 6: mod_base = OTHER; note = 2'-O-methyl modified nucleotide
  modified_base 7: mod_base = OTHER; note = 2'-fluoro modified nucleotide
  modified_base 8: mod_base = OTHER; note = 2'-O-methyl modified nucleotide
  modified_base 9: mod_base = OTHER; note = 2'-O-methyl modified nucleotide
  modified_base 10: mod_base = OTHER; note = 2'-fluoro modified nucleotide
  modified_base 11: mod_base = OTHER; note = 2'-O-methyl modified nucleotide
  modified_base 12: mod_base = OTHER; note = 2'-O-methyl modified nucleotide
  modified_base 13: mod_base = OTHER; note = 2'-O-methyl modified nucleotide
  modified_base 14: mod_base = OTHER; note = 2'-fluoro modified nucleotide
  modified_base 15: mod_base = OTHER; note = 2'-O-methyl modified nucleotide
  modified_base 16: mod_base = OTHER; note = 2'-fluoro modified nucleotide
  modified_base 17: mod_base = OTHER; note = 2'-O-methyl modified nucleotide
  modified_base 18: mod_base = OTHER; note = 2'-O-methyl modified nucleotide
  modified_base 19: mod_base = OTHER; note = 2'-fluoro modified nucleotide
  modified_base 20: mod_base = OTHER; note = 2'-O-methyl modified nucleotide with phosphorothioate linkage
  modified_base 21: mod_base = OTHER; note = 2'-O-methyl modified nucleotide with phosphorothioate linkage
  modified_base 22: mod_base = OTHER; note = 2'-O-methyl modified nucleotide
ttacatagagaacaccctctgg

SEQ ID NO: 1650 - RNA, 22 nt, synthetic construct
  source 1..22: mol_type = other RNA
  modified_base 1: mod_base = OTHER; note = 4'-O-monomethylphosphonate-2'-O-methyl uridine phosphorothioate
  modified_base 2: mod_base = OTHER; note = 2'-fluoro modified nucleotide with phosphorothioate linkage
  modified_base 3: mod_base = OTHER; note = 2'-fluoro modified nucleotide
  modified_base 4: mod_base = OTHER; note = 2'-fluoro modified nucleotide
  modified_base 5: mod_base = OTHER; note = 2'-fluoro modified nucleotide
  modified_base 6: mod_base = OTHER; note = 2'-O-methyl modified nucleotide
  modified_base 7: mod_base = OTHER; note = 2'-fluoro modified nucleotide
  modified_base 8: mod_base = OTHER; note = 2'-O-methyl modified nucleotide
  modified_base 9: mod_base = OTHER; note = 2'-O-methyl modified nucleotide
  modified_base 10: mod_base = OTHER; note = 2'-fluoro modified nucleotide
  modified_base 11: mod_base = OTHER; note = 2'-O-methyl modified nucleotide
  modified_base 12: mod_base = OTHER; note = 2'-O-methyl modified nucleotide
  modified_base 13: mod_base = OTHER; note = 2'-O-methyl modified nucleotide
  modified_base 14: mod_base = OTHER; note = 2'-fluoro modified nucleotide
  modified_base 15: mod_base = OTHER; note = 2'-O-methyl modified nucleotide
  modified_base 16: mod_base = OTHER; note = 2'-fluoro modified nucleotide
  modified_base 17: mod_base = OTHER; note = 2'-O-methyl modified nucleotide
  modified_base 18: mod_base = OTHER; note = 2'-O-methyl modified nucleotide
  modified_base 19: mod_base = OTHER; note = 2'-fluoro modified nucleotide
  modified_base 20: mod_base = OTHER; note = 2'-O-methyl modified nucleotide with phosphorothioate linkage
  modified_base 21: mod_base = OTHER; note = 2'-O-methyl modified nucleotide with phosphorothioate linkage
  modified_base 22: mod_base = OTHER; note = 2'-O-methyl modified nucleotide
ttcacttgctctttggtcttgg

SEQ ID NO: 1651 - RNA, 22 nt, synthetic construct
  source 1..22: mol_type = other RNA
  modified_base 1: mod_base = OTHER; note = 4'-O-monomethylphosphonate-2'-O-methyl uridine phosphorothioate
  modified_base 2: mod_base = OTHER; note = 2'-fluoro modified nucleotide with phosphorothioate linkage
  modified_base 3: mod_base = OTHER; note = 2'-fluoro modified nucleotide
  modified_base 4: mod_base = OTHER; note = 2'-fluoro modified nucleotide
  modified_base 5: mod_base = OTHER; note = 2'-fluoro modified nucleotide
  modified_base 6: mod_base = OTHER; note = 2'-O-methyl modified nucleotide
  modified_base 7: mod_base = OTHER; note = 2'-fluoro modified nucleotide
  modified_base 8: mod_base = OTHER; note = 2'-O-methyl modified nucleotide
  modified_base 9: mod_base = OTHER; note = 2'-O-methyl modified nucleotide
  modified_base 10: mod_base = OTHER; note = 2'-fluoro modified nucleotide
  modified_base 11: mod_base = OTHER; note = 2'-O-methyl modified nucleotide
  modified_base 12: mod_base = OTHER; note = 2'-O-methyl modified nucleotide
  modified_base 13: mod_base = OTHER; note = 2'-O-methyl modified nucleotide
  modified_base 14: mod_base = OTHER; note = 2'-fluoro modified nucleotide
  modified_base 15: mod_base = OTHER; note = 2'-O-methyl modified nucleotide
  modified_base 16: mod_base = OTHER; note = 2'-fluoro modified nucleotide
  modified_base 17: mod_base = OTHER; note = 2'-O-methyl modified nucleotide
  modified_base 18: mod_base = OTHER; note = 2'-O-methyl modified nucleotide
  modified_base 19: mod_base = OTHER; note = 2'-fluoro modified nucleotide
  modified_base 20: mod_base = OTHER; note = 2'-O-methyl modified nucleotide with phosphorothioate linkage
  modified_base 21: mod_base = OTHER; note = 2'-O-methyl modified nucleotide with phosphorothioate linkage
  modified_base 22: mod_base = OTHER; note = 2'-O-methyl modified nucleotide
tatttgtcacttgctctttggg

SEQ ID NO: 1652 - RNA, 22 nt, synthetic construct
  source 1..22: mol_type = other RNA
  modified_base 1: mod_base = OTHER; note = 4'-O-monomethylphosphonate-2'-O-methyl uridine phosphorothioate
  modified_base 2: mod_base = OTHER; note = 2'-fluoro modified nucleotide with phosphorothioate linkage
  modified_base 3: mod_base = OTHER; note = 2'-fluoro modified nucleotide
  modified_base 4: mod_base = OTHER; note = 2'-fluoro modified nucleotide
  modified_base 5: mod_base = OTHER; note = 2'-fluoro modified nucleotide
  modified_base 6: mod_base = OTHER; note = 2'-O-methyl modified nucleotide
  modified_base 7: mod_base = OTHER; note = 2'-fluoro modified nucleotide
  modified_base 8: mod_base = OTHER; note = 2'-O-methyl modified nucleotide
  modified_base 9: mod_base = OTHER; note = 2'-O-methyl modified nucleotide
  modified_base 10: mod_base = OTHER; note = 2'-fluoro modified nucleotide
  modified_base 11: mod_base = OTHER; note = 2'-O-methyl modified nucleotide
  modified_base 12: mod_base = OTHER; note = 2'-O-methyl modified nucleotide
  modified_base 13: mod_base = OTHER; note = 2'-O-methyl modified nucleotide
  modified_base 14: mod_base = OTHER; note = 2'-fluoro modified nucleotide
  modified_base 15: mod_base = OTHER; note = 2'-O-methyl modified nucleotide
  modified_base 16: mod_base = OTHER; note = 2'-fluoro modified nucleotide
  modified_base 17: mod_base = OTHER; note = 2'-O-methyl modified nucleotide
  modified_base 18: mod_base = OTHER; note = 2'-O-methyl modified nucleotide
  modified_base 19: mod_base = OTHER; note = 2'-fluoro modified nucleotide
  modified_base 20: mod_base = OTHER; note = 2'-O-methyl modified nucleotide with phosphorothioate linkage
  modified_base 21: mod_base = OTHER; note = 2'-O-methyl modified nucleotide with phosphorothioate linkage
  modified_base 22: mod_base = OTHER; note = 2'-O-methyl modified nucleotide
tcctccaacatttgtcacttgg

SEQ ID NO: 1653 - RNA, 22 nt, synthetic construct
  source 1..22: mol_type = other RNA
  modified_base 1: mod_base = OTHER; note = 4'-O-monomethylphosphonate-2'-O-methyl uridine phosphorothioate
  modified_base 2: mod_base = OTHER; note = 2'-fluoro modified nucleotide with phosphorothioate linkage
  modified_base 3: mod_base = OTHER; note = 2'-fluoro modified nucleotide
  modified_base 4: mod_base = OTHER; note = 2'-fluoro modified nucleotide
  modified_base 5: mod_base = OTHER; note = 2'-fluoro modified nucleotide
  modified_base 6: mod_base = OTHER; note = 2'-O-methyl modified nucleotide
  modified_base 7: mod_base = OTHER; note = 2'-fluoro modified nucleotide
  modified_base 8: mod_base = OTHER; note = 2'-O-methyl modified nucleotide
  modified_base 9: mod_base = OTHER; note = 2'-O-methyl modified nucleotide
  modified_base 10: mod_base = OTHER; note = 2'-fluoro modified nucleotide
  modified_base 11: mod_base = OTHER; note = 2'-O-methyl modified nucleotide
  modified_base 12: mod_base = OTHER; note = 2'-O-methyl modified nucleotide
  modified_base 13: mod_base = OTHER; note = 2'-O-methyl modified nucleotide
  modified_base 14: mod_base = OTHER; note = 2'-fluoro modified nucleotide
  modified_base 15: mod_base = OTHER; note = 2'-O-methyl modified nucleotide
  modified_base 16: mod_base = OTHER; note = 2'-fluoro modified nucleotide
  modified_base 17: mod_base = OTHER; note = 2'-O-methyl modified nucleotide
  modified_base 18: mod_base = OTHER; note = 2'-O-methyl modified nucleotide
  modified_base 19: mod_base = OTHER; note = 2'-fluoro modified nucleotide
  modified_base 20: mod_base = OTHER; note = 2'-O-methyl modified nucleotide with phosphorothioate linkage
  modified_base 21: mod_base = OTHER; note = 2'-O-methyl modified nucleotide with phosphorothioate linkage
  modified_base 22: mod_base = OTHER; note = 2'-O-methyl modified nucleotide
tttcttaggcttcaggttcggg

SEQ ID NO: 1654 - RNA, 22 nt, synthetic construct
  source 1..22: mol_type = other RNA
  modified_base 1: mod_base = OTHER; note = 4'-O-monomethylphosphonate-2'-O-methyl uridine phosphorothioate
  modified_base 2: mod_base = OTHER; note = 2'-fluoro modified nucleotide with phosphorothioate linkage
  modified_base 3: mod_base = OTHER; note = 2'-fluoro modified nucleotide
  modified_base 4: mod_base = OTHER; note = 2'-fluoro modified nucleotide
  modified_base 5: mod_base = OTHER; note = 2'-fluoro modified nucleotide
  modified_base 6: mod_base = OTHER; note = 2'-O-methyl modified nucleotide
  modified_base 7: mod_base = OTHER; note = 2'-fluoro modified nucleotide
  modified_base 8: mod_base = OTHER; note = 2'-O-methyl modified nucleotide
  modified_base 9: mod_base = OTHER; note = 2'-O-methyl modified nucleotide
  modified_base 10: mod_base = OTHER; note = 2'-fluoro modified nucleotide
  modified_base 11: mod_base = OTHER; note = 2'-O-methyl modified nucleotide
  modified_base 12: mod_base = OTHER; note = 2'-O-methyl modified nucleotide
  modified_base 13: mod_base = OTHER; note = 2'-O-methyl modified nucleotide
  modified_base 14: mod_base = OTHER; note = 2'-fluoro modified nucleotide
  modified_base 15: mod_base = OTHER; note = 2'-O-methyl modified nucleotide
  modified_base 16: mod_base = OTHER; note = 2'-fluoro modified nucleotide
  modified_base 17: mod_base = OTHER; note = 2'-O-methyl modified nucleotide
  modified_base 18: mod_base = OTHER; note = 2'-O-methyl modified nucleotide
  modified_base 19: mod_base = OTHER; note = 2'-fluoro modified nucleotide
  modified_base 20: mod_base = OTHER; note = 2'-O-methyl modified nucleotide with phosphorothioate linkage
  modified_base 21: mod_base = OTHER; note = 2'-O-methyl modified nucleotide with phosphorothioate linkage
  modified_base 22: mod_base = OTHER; note = 2'-O-methyl modified nucleotide
taactgggagcaaagatattgg

SEQ ID NO: 1655 - RNA, 22 nt, synthetic construct
  source 1..22: mol_type = other RNA
  modified_base 1: mod_base = OTHER; note = 4'-O-monomethylphosphonate-2'-O-methyl uridine phosphorothioate
  modified_base 2: mod_base = OTHER; note = 2'-fluoro modified nucleotide with phosphorothioate linkage
  modified_base 3: mod_base = OTHER; note = 2'-fluoro modified nucleotide
  modified_base 4: mod_base = OTHER; note = 2'-fluoro modified nucleotide
  modified_base 5: mod_base = OTHER; note = 2'-fluoro modified nucleotide
  modified_base 6: mod_base = OTHER; note = 2'-O-methyl modified nucleotide
  modified_base 7: mod_base = OTHER; note = 2'-fluoro modified nucleotide
  modified_base 8: mod_base = OTHER; note = 2'-O-methyl modified nucleotide
  modified_base 9: mod_base = OTHER; note = 2'-O-methyl modified nucleotide
  modified_base 10: mod_base = OTHER; note = 2'-fluoro modified nucleotide
  modified_base 11: mod_base = OTHER; note = 2'-O-methyl modified nucleotide
  modified_base 12: mod_base = OTHER; note = 2'-O-methyl modified nucleotide
  modified_base 13: mod_base = OTHER; note = 2'-O-methyl modified nucleotide
  modified_base 14: mod_base = OTHER; note = 2'-fluoro modified nucleotide
  modified_base 15: mod_base = OTHER; note = 2'-O-methyl modified nucleotide
  modified_base 16: mod_base = OTHER; note = 2'-fluoro modified nucleotide
  modified_base 17: mod_base = OTHER; note = 2'-O-methyl modified nucleotide
  modified_base 18: mod_base = OTHER; note = 2'-O-methyl modified nucleotide
  modified_base 19: mod_base = OTHER; note = 2'-fluoro modified nucleotide
  modified_base 20: mod_base = OTHER; note = 2'-O-methyl modified nucleotide with phosphorothioate linkage
  modified_base 21: mod_base = OTHER; note = 2'-O-methyl modified nucleotide with phosphorothioate linkage
  modified_base 22: mod_base = OTHER; note = 2'-O-methyl modified nucleotide
tgactgggcacattggaactgg

SEQ ID NO: 1656 - RNA, 22 nt, synthetic construct
  source 1..22: mol_type = other RNA
  modified_base 1: mod_base = OTHER; note = 4'-O-monomethylphosphonate-2'-O-methyl uridine phosphorothioate
  modified_base 2: mod_base = OTHER; note = 2'-fluoro modified nucleotide with phosphorothioate linkage
  modified_base 3: mod_base = OTHER; note = 2'-fluoro modified nucleotide
  modified_base 4: mod_base = OTHER; note = 2'-fluoro modified nucleotide
  modified_base 5: mod_base = OTHER; note = 2'-fluoro modified nucleotide
  modified_base 6: mod_base = OTHER; note = 2'-O-methyl modified nucleotide
  modified_base 7: mod_base = OTHER; note = 2'-fluoro modified nucleotide
  modified_base 8: mod_base = OTHER; note = 2'-O-methyl modified nucleotide
  modified_base 9: mod_base = OTHER; note = 2'-O-methyl modified nucleotide
  modified_base 10: mod_base = OTHER; note = 2'-fluoro modified nucleotide
  modified_base 11: mod_base = OTHER; note = 2'-O-methyl modified nucleotide
  modified_base 12: mod_base = OTHER; note = 2'-O-methyl modified nucleotide
  modified_base 13: mod_base = OTHER; note = 2'-O-methyl modified nucleotide
  modified_base 14: mod_base = OTHER; note = 2'-fluoro modified nucleotide
  modified_base 15: mod_base = OTHER; note = 2'-O-methyl modified nucleotide
  modified_base 16: mod_base = OTHER; note = 2'-fluoro modified nucleotide
  modified_base 17: mod_base = OTHER; note = 2'-O-methyl modified nucleotide
  modified_base 18: mod_base = OTHER; note = 2'-O-methyl modified nucleotide
  modified_base 19: mod_base = OTHER; note = 2'-fluoro modified nucleotide
  modified_base 20: mod_base = OTHER; note = 2'-O-methyl modified nucleotide with phosphorothioate linkage
  modified_base 21: mod_base = OTHER; note = 2'-O-methyl modified nucleotide with phosphorothioate linkage
  modified_base 22: mod_base = OTHER; note = 2'-O-methyl modified nucleotide
tttgagaaatgtcatgactggg

SEQ ID NO: 1657 - RNA, 22 nt, synthetic construct
  source 1..22: mol_type = other RNA
  modified_base 1: mod_base = OTHER; note = 4'-O-monomethylphosphonate-2'-O-methyl uridine phosphorothioate
  modified_base 2: mod_base = OTHER; note = 2'-fluoro modified nucleotide with phosphorothioate linkage
  modified_base 3: mod_base = OTHER; note = 2'-fluoro modified nucleotide
  modified_base 4: mod_base = OTHER; note = 2'-fluoro modified nucleotide
  modified_base 5: mod_base = OTHER; note = 2'-fluoro modified nucleotide
  modified_base 6: mod_base = OTHER; note = 2'-O-methyl modified nucleotide
  modified_base 7: mod_base = OTHER; note = 2'-fluoro modified nucleotide
  modified_base 8: mod_base = OTHER; note = 2'-O-methyl modified nucleotide
  modified_base 9: mod_base = OTHER; note = 2'-O-methyl modified nucleotide
  modified_base 10: mod_base = OTHER; note = 2'-fluoro modified nucleotide
  modified_base 11: mod_base = OTHER; note = 2'-O-methyl modified nucleotide
  modified_base 12: mod_base = OTHER; note = 2'-O-methyl modified nucleotide
  modified_base 13: mod_base = OTHER; note = 2'-O-methyl modified nucleotide
  modified_base 14: mod_base = OTHER; note = 2'-fluoro modified nucleotide
  modified_base 15: mod_base = OTHER; note = 2'-O-methyl modified nucleotide
  modified_base 16: mod_base = OTHER; note = 2'-fluoro modified nucleotide
  modified_base 17: mod_base = OTHER; note = 2'-O-methyl modified nucleotide
  modified_base 18: mod_base = OTHER; note = 2'-O-methyl modified nucleotide
  modified_base 19: mod_base = OTHER; note = 2'-fluoro modified nucleotide
  modified_base 20: mod_base = OTHER; note = 2'-O-methyl modified nucleotide with phosphorothioate linkage
  modified_base 21: mod_base = OTHER; note = 2'-O-methyl modified nucleotide with phosphorothioate linkage
  modified_base 22: mod_base = OTHER; note = 2'-O-methyl modified nucleotide
taaaactttgagaaatgtcagg

SEQ ID NO: 1658 - RNA, 22 nt, synthetic construct
  source 1..22: mol_type = other RNA
  modified_base 1: mod_base = OTHER; note = 4'-O-monomethylphosphonate-2'-O-methyl uridine phosphorothioate
  modified_base 2: mod_base = OTHER; note = 2'-fluoro modified nucleotide with phosphorothioate linkage
  modified_base 3: mod_base = OTHER; note = 2'-fluoro modified nucleotide
  modified_base 4: mod_base = OTHER; note = 2'-fluoro modified nucleotide
  modified_base 5: mod_base = OTHER; note = 2'-fluoro modified nucleotide
  modified_base 6: mod_base = OTHER; note = 2'-O-methyl modified nucleotide
  modified_base 7: mod_base = OTHER; note = 2'-fluoro modified nucleotide
  modified_base 8: mod_base = OTHER; note = 2'-O-methyl modified nucleotide
  modified_base 9: mod_base = OTHER; note = 2'-O-methyl modified nucleotide
  modified_base 10: mod_base = OTHER; note = 2'-fluoro modified nucleotide
  modified_base 11: mod_base = OTHER; note = 2'-O-methyl modified nucleotide
  modified_base 12: mod_base = OTHER; note = 2'-O-methyl modified nucleotide
  modified_base 13: mod_base = OTHER; note = 2'-O-methyl modified nucleotide
  modified_base 14: mod_base = OTHER; note = 2'-fluoro modified nucleotide
  modified_base 15: mod_base = OTHER; note = 2'-O-methyl modified nucleotide
  modified_base 16: mod_base = OTHER; note = 2'-fluoro modified nucleotide
  modified_base 17: mod_base = OTHER; note = 2'-O-methyl modified nucleotide
  modified_base 18: mod_base = OTHER; note = 2'-O-methyl modified nucleotide
  modified_base 19: mod_base = OTHER; note = 2'-fluoro modified nucleotide
  modified_base 20: mod_base = OTHER; note = 2'-O-methyl modified nucleotide with phosphorothioate linkage
  modified_base 21: mod_base = OTHER; note = 2'-O-methyl modified nucleotide with phosphorothioate linkage
  modified_base 22: mod_base = OTHER; note = 2'-O-methyl modified nucleotide
tgatacttcaatcactgctggg

SEQ ID NO: 1659 - RNA, 22 nt, synthetic construct
  source 1..22: mol_type = other RNA
  modified_base 1: mod_base = OTHER; note = 4'-O-monomethylphosphonate-2'-O-methyl uridine phosphorothioate
  modified_base 2: mod_base = OTHER; note = 2'-fluoro modified nucleotide with phosphorothioate linkage
  modified_base 3: mod_base = OTHER; note = 2'-fluoro modified nucleotide with phosphorothioate linkage
  modified_base 4: mod_base = OTHER; note = 2'-fluoro modified nucleotide
  modified_base 5: mod_base = OTHER; note = 2'-fluoro modified nucleotide
  modified_base 6: mod_base = OTHER; note = 2'-O-methyl modified nucleotide
  modified_base 7: mod_base = OTHER; note = 2'-fluoro modified nucleotide
  modified_base 8: mod_base = OTHER; note = 2'-O-methyl modified nucleotide
  modified_base 9: mod_base = OTHER; note = 2'-O-methyl modified nucleotide
  modified_base 10: mod_base = OTHER; note = 2'-fluoro modified nucleotide
  modified_base 11: mod_base = OTHER; note = 2'-O-methyl modified nucleotide
  modified_base 12: mod_base = OTHER; note = 2'-O-methyl modified nucleotide
  modified_base 13: mod_base = OTHER; note = 2'-O-methyl modified nucleotide
  modified_base 14: mod_base = OTHER; note = 2'-fluoro modified nucleotide
  modified_base 15: mod_base = OTHER; note = 2'-O-methyl modified nucleotide
  modified_base 16: mod_base = OTHER; note = 2'-O-methyl modified nucleotide
  modified_base 17: mod_base = OTHER; note = 2'-O-methyl modified nucleotide
  modified_base 18: mod_base = OTHER; note = 2'-O-methyl modified nucleotide
  modified_base 19: mod_base = OTHER; note = 2'-O-methyl modified nucleotide
  modified_base 20: mod_base = OTHER; note = 2'-O-methyl modified nucleotide with phosphorothioate linkage
  modified_base 21: mod_base = OTHER; note = 2'-O-methyl modified nucleotide with phosphorothioate linkage
  modified_base 22: mod_base = OTHER; note = 2'-O-methyl modified nucleotide
tgtcctttcatgaatacatcgg

SEQ ID NO: 1660 - RNA, 22 nt, synthetic construct
  source 1..22: mol_type = other RNA
  modified_base 1: mod_base = OTHER; note = 4'-O-monomethylphosphonate-2'-O-methyl uridine phosphorothioate
  modified_base 2: mod_base = OTHER; note = 2'-fluoro modified nucleotide with phosphorothioate linkage
  modified_base 3: mod_base = OTHER; note = 2'-fluoro modified nucleotide
  modified_base 4: mod_base = OTHER; note = 2'-fluoro modified nucleotide
  modified_base 5: mod_base = OTHER; note = 2'-fluoro modified nucleotide
  modified_base 6: mod_base = OTHER; note = 2'-O-methyl modified nucleotide
  modified_base 7: mod_base = OTHER; note = 2'-fluoro modified nucleotide
  modified_base 8: mod_base = OTHER; note = 2'-O-methyl modified nucleotide
  modified_base 9: mod_base = OTHER; note = 2'-O-methyl modified nucleotide
  modified_base 10: mod_base = OTHER; note = 2'-fluoro modified nucleotide
  modified_base 11: mod_base = OTHER; note = 2'-O-methyl modified nucleotide
  modified_base 12: mod_base = OTHER; note = 2'-O-methyl modified nucleotide
  modified_base 13: mod_base = OTHER; note = 2'-O-methyl modified nucleotide
  modified_base 14: mod_base = OTHER; note = 2'-fluoro modified nucleotide
  modified_base 15: mod_base = OTHER; note = 2'-O-methyl modified nucleotide
  modified_base 16: mod_base = OTHER; note = 2'-fluoro modified nucleotide
  modified_base 17: mod_base = OTHER; note = 2'-O-methyl modified nucleotide
  modified_base 18: mod_base = OTHER; note = 2'-O-methyl modified nucleotide
  modified_base 19: mod_base = OTHER; note = 2'-fluoro modified nucleotide
  modified_base 20: mod_base = OTHER; note = 2'-O-methyl modified nucleotide with phosphorothioate linkage
  modified_base 21: mod_base = OTHER; note = 2'-O-methyl modified nucleotide with phosphorothioate linkage
  modified_base 22: mod_base = OTHER; note = 2'-O-methyl modified nucleotide
tcttctgaacaacagcaacagg

SEQ ID NO: 1661 - RNA, 22 nt, synthetic construct
  source 1..22: mol_type = other RNA
  modified_base 1: mod_base = OTHER; note = 4'-O-monomethylphosphonate-2'-O-methyl uridine phosphorothioate
  modified_base 2: mod_base = OTHER; note = 2'-fluoro modified nucleotide with phosphorothioate linkage
  modified_base 3: mod_base = OTHER; note = 2'-fluoro modified nucleotide
  modified_base 4: mod_base = OTHER; note = 2'-fluoro modified nucleotide
  modified_base 5: mod_base = OTHER; note = 2'-fluoro modified nucleotide
  modified_base 6: mod_base = OTHER; note = 2'-O-methyl modified nucleotide
  modified_base 7: mod_base = OTHER; note = 2'-fluoro modified nucleotide
  modified_base 8: mod_base = OTHER; note = 2'-O-methyl modified nucleotide
  modified_base 9: mod_base = OTHER; note = 2'-O-methyl modified nucleotide
  modified_base 10: mod_base = OTHER; note = 2'-fluoro modified nucleotide
  modified_base 11: mod_base = OTHER; note = 2'-O-methyl modified nucleotide
  modified_base 12: mod_base = OTHER; note = 2'-O-methyl modified nucleotide
  modified_base 13: mod_base = OTHER; note = 2'-O-methyl modified nucleotide
  modified_base 14: mod_base = OTHER; note = 2'-fluoro modified nucleotide
  modified_base 15: mod_base = OTHER; note = 2'-O-methyl modified nucleotide
  modified_base 16: mod_base = OTHER; note = 2'-fluoro modified nucleotide
  modified_base 17: mod_base = OTHER; note = 2'-O-methyl modified nucleotide
  modified_base 18: mod_base = OTHER; note = 2'-O-methyl modified nucleotide
  modified_base 19: mod_base = OTHER; note = 2'-fluoro modified nucleotide
  modified_base 20: mod_base = OTHER; note = 2'-O-methyl modified nucleotide with phosphorothioate linkage
  modified_base 21: mod_base = OTHER; note = 2'-O-methyl modified nucleotide with phosphorothioate linkage
  modified_base 22: mod_base = OTHER; note = 2'-O-methyl modified nucleotide
taaaagacacctaaaaatctgg

SEQ ID NO: 1662 - RNA, 22 nt, synthetic construct
  source 1..22: mol_type = other RNA
  modified_base 1: mod_base = OTHER; note = 4'-O-monomethylphosphonate-2'-O-methyl uridine phosphorothioate
  modified_base 2: mod_base = OTHER; note = 2'-fluoro modified nucleotide with phosphorothioate linkage
  modified_base 3: mod_base = OTHER; note = 2'-fluoro modified nucleotide
  modified_base 4: mod_base = OTHER; note = 2'-fluoro modified nucleotide
  modified_base 5: mod_base = OTHER; note = 2'-fluoro modified nucleotide
  modified_base 6: mod_base = OTHER; note = 2'-O-methyl modified nucleotide
  modified_base 7: mod_base = OTHER; note = 2'-fluoro modified nucleotide
  modified_base 8: mod_base = OTHER; note = 2'-O-methyl modified nucleotide
  modified_base 9: mod_base = OTHER; note = 2'-O-methyl modified nucleotide
  modified_base 10: mod_base = OTHER; note = 2'-fluoro modified nucleotide
  modified_base 11: mod_base = OTHER; note = 2'-O-methyl modified nucleotide
  modified_base 12: mod_base = OTHER; note = 2'-O-methyl modified nucleotide
  modified_base 13: mod_base = OTHER; note = 2'-O-methyl modified nucleotide
  modified_base 14: mod_base = OTHER; note = 2'-fluoro modified nucleotide
  modified_base 15: mod_base = OTHER; note = 2'-O-methyl modified nucleotide
  modified_base 16: mod_base = OTHER; note = 2'-fluoro modified nucleotide
  modified_base 17: mod_base = OTHER; note = 2'-O-methyl modified nucleotide
  modified_base 18: mod_base = OTHER; note = 2'-O-methyl modified nucleotide
  modified_base 19: mod_base = OTHER; note = 2'-fluoro modified nucleotide
  modified_base 20: mod_base = OTHER; note = 2'-O-methyl modified nucleotide with phosphorothioate linkage
  modified_base 21: mod_base = OTHER; note = 2'-O-methyl modified nucleotide with phosphorothioate linkage
  modified_base 22: mod_base = OTHER; note = 2'-O-methyl modified nucleotide
tagtatcattaaaagacaccgg

SEQ ID NO: 1663 - RNA, 22 nt, synthetic construct
  source 1..22: mol_type = other RNA
  modified_base 1: mod_base = OTHER; note = 4'-O-monomethylphosphonate-2'-O-methyl uridine phosphorothioate
  modified_base 2: mod_base = OTHER; note = 2'-fluoro modified nucleotide with phosphorothioate linkage
  modified_base 3: mod_base = OTHER; note = 2'-fluoro modified nucleotide
  modified_base 4: mod_base = OTHER; note = 2'-fluoro modified nucleotide
  modified_base 5: mod_base = OTHER; note = 2'-fluoro modified nucleotide
  modified_base 6: mod_base = OTHER; note = 2'-O-methyl modified nucleotide
  modified_base 7: mod_base = OTHER; note = 2'-fluoro modified nucleotide
  modified_base 8: mod_base = OTHER; note = 2'-O-methyl modified nucleotide
  modified_base 9: mod_base = OTHER; note = 2'-O-methyl modified nucleotide
  modified_base 10: mod_base = OTHER; note = 2'-fluoro modified nucleotide
  modified_base 11: mod_base = OTHER; note = 2'-O-methyl modified nucleotide
  modified_base 12: mod_base = OTHER; note = 2'-O-methyl modified nucleotide
  modified_base 13: mod_base = OTHER; note = 2'-O-methyl modified nucleotide
  modified_base 14: mod_base = OTHER; note = 2'-fluoro modified nucleotide
  modified_base 15: mod_base = OTHER; note = 2'-O-methyl modified nucleotide
  modified_base 16: mod_base = OTHER; note = 2'-fluoro modified nucleotide
  modified_base 17: mod_base = OTHER; note = 2'-O-methyl modified nucleotide
  modified_base 18: mod_base = OTHER; note = 2'-O-methyl modified nucleotide
  modified_base 19: mod_base = OTHER; note = 2'-fluoro modified nucleotide
  modified_base 20: mod_base = OTHER; note = 2'-O-methyl modified nucleotide with phosphorothioate linkage
  modified_base 21: mod_base = OTHER; note = 2'-O-methyl modified nucleotide with phosphorothioate linkage
  modified_base 22: mod_base = OTHER; note = 2'-O-methyl modified nucleotide
tgctaatgaattcctttacagg

SEQ ID NO: 1664 - RNA, 22 nt, synthetic construct
  source 1..22: mol_type = other RNA
  modified_base 1: mod_base = OTHER; note = 4'-O-monomethylphosphonate-2'-O-methyl uridine phosphorothioate
  modified_base 2: mod_base = OTHER; note = 2'-fluoro modified nucleotide with phosphorothioate linkage
  modified_base 3: mod_base = OTHER; note = 2'-fluoro modified nucleotide
  modified_base 4: mod_base = OTHER; note = 2'-fluoro modified nucleotide
  modified_base 5: mod_base = OTHER; note = 2'-fluoro modified nucleotide
  modified_base 6: mod_base = OTHER; note = 2'-O-methyl modified nucleotide
  modified_base 7: mod_base = OTHER; note = 2'-fluoro modified nucleotide
  modified_base 8: mod_base = OTHER; note = 2'-O-methyl modified nucleotide
  modified_base 9: mod_base = OTHER; note = 2'-O-methyl modified nucleotide
  modified_base 10: mod_base = OTHER; note = 2'-fluoro modified nucleotide
  modified_base 11: mod_base = OTHER; note = 2'-O-methyl modified nucleotide
  modified_base 12: mod_base = OTHER; note = 2'-O-methyl modified nucleotide
  modified_base 13: mod_base = OTHER; note = 2'-O-methyl modified nucleotide
  modified_base 14: mod_base = OTHER; note = 2'-fluoro modified nucleotide
  modified_base 15: mod_base = OTHER; note = 2'-O-methyl modified nucleotide
  modified_base 16: mod_base = OTHER; note = 2'-fluoro modified nucleotide
  modified_base 17: mod_base = OTHER; note = 2'-O-methyl modified nucleotide
  modified_base 18: mod_base = OTHER; note = 2'-O-methyl modified nucleotide
  modified_base 19: mod_base = OTHER; note = 2'-fluoro modified nucleotide
  modified_base 20: mod_base = OTHER; note = 2'-O-methyl modified nucleotide with phosphorothioate linkage
  modified_base 21: mod_base = OTHER; note = 2'-O-methyl modified nucleotide with phosphorothioate linkage
  modified_base 22: mod_base = OTHER; note = 2'-O-methyl modified nucleotide
tctttcatgaatacatccatgg

SEQ ID NO: 1665 - RNA, 22 nt, synthetic construct
  source 1..22: mol_type = other RNA
  modified_base 1: mod_base = OTHER; note = 4'-O-monomethylphosphonate-2'-O-methyl uridine phosphorothioate
  modified_base 2: mod_base = OTHER; note = 2'-fluoro modified nucleotide with phosphorothioate linkage
  modified_base 3: mod_base = OTHER; note = 2'-fluoro modified nucleotide
  modified_base 4: mod_base = OTHER; note = 2'-fluoro modified nucleotide
  modified_base 5: mod_base = OTHER; note = 2'-fluoro modified nucleotide
  modified_base 6: mod_base = OTHER; note = 2'-O-methyl modified nucleotide
  modified_base 7: mod_base = OTHER; note = 2'-fluoro modified nucleotide
  modified_base 8: mod_base = OTHER; note = 2'-O-methyl modified nucleotide
  modified_base 9: mod_base = OTHER; note = 2'-O-methyl modified nucleotide
  modified_base 10: mod_base = OTHER; note = 2'-fluoro modified nucleotide
  modified_base 11: mod_base = OTHER; note = 2'-O-methyl modified nucleotide
  modified_base 12: mod_base = OTHER; note = 2'-O-methyl modified nucleotide
  modified_base 13: mod_base = OTHER; note = 2'-O-methyl modified nucleotide
  modified_base 14: mod_base = OTHER; note = 2'-fluoro modified nucleotide
  modified_base 15: mod_base = OTHER; note = 2'-O-methyl modified nucleotide
  modified_base 16: mod_base = OTHER; note = 2'-fluoro modified nucleotide
  modified_base 17: mod_base = OTHER; note = 2'-O-methyl modified nucleotide
  modified_base 18: mod_base = OTHER; note = 2'-O-methyl modified nucleotide
  modified_base 19: mod_base = OTHER; note = 2'-fluoro modified nucleotide
  modified_base 20: mod_base = OTHER; note = 2'-O-methyl modified nucleotide with phosphorothioate linkage
  modified_base 21: mod_base = OTHER; note = 2'-O-methyl modified nucleotide with phosphorothioate linkage
  modified_base 22: mod_base = OTHER; note = 2'-O-methyl modified nucleotide
taacatttgtcacttgctctgg

SEQ ID NO: 1666 - RNA, 22 nt, synthetic construct
  source 1..22: mol_type = other RNA
  modified_base 1: mod_base = OTHER; note = 4'-O-monomethylphosphonate-2'-O-methyl uridine phosphorothioate
  modified_base 2: mod_base = OTHER; note = 2'-fluoro modified nucleotide with phosphorothioate linkage
  modified_base 3: mod_base = OTHER; note = 2'-fluoro modified nucleotide
  modified_base 4: mod_base = OTHER; note = 2'-fluoro modified nucleotide
  modified_base 5: mod_base = OTHER; note = 2'-fluoro modified nucleotide
  modified_base 6: mod_base = OTHER; note = 2'-O-methyl modified nucleotide
  modified_base 7: mod_base = OTHER; note = 2'-fluoro modified nucleotide
  modified_base 8: mod_base = OTHER; note = 2'-O-methyl modified nucleotide
  modified_base 9: mod_base = OTHER; note = 2'-O-methyl modified nucleotide
  modified_base 10: mod_base = OTHER; note = 2'-fluoro modified nucleotide
  modified_base 11: mod_base = OTHER; note = 2'-O-methyl modified nucleotide
  modified_base 12: mod_base = OTHER; note = 2'-O-methyl modified nucleotide
  modified_base 13: mod_base = OTHER; note = 2'-O-methyl modified nucleotide
  modified_base 14: mod_base = OTHER; note = 2'-fluoro modified nucleotide
  modified_base 15: mod_base = OTHER; note = 2'-O-methyl modified nucleotide
  modified_base 16: mod_base = OTHER; note = 2'-fluoro modified nucleotide
  modified_base 17: mod_base = OTHER; note = 2'-O-methyl modified nucleotide
  modified_base 18: mod_base = OTHER; note = 2'-O-methyl modified nucleotide
  modified_base 19: mod_base = OTHER; note = 2'-fluoro modified nucleotide
  modified_base 20: mod_base = OTHER; note = 2'-O-methyl modified nucleotide with phosphorothioate linkage
  modified_base 21: mod_base = OTHER; note = 2'-O-methyl modified nucleotide with phosphorothioate linkage
  modified_base 22: mod_base = OTHER; note = 2'-O-methyl modified nucleotide
tttcgtagtcttgataccctgg

SEQ ID NO: 1667 - RNA, 22 nt, synthetic construct
  source 1..22: mol_type = other RNA
  modified_base 1: mod_base = OTHER; note = 4'-O-monomethylphosphonate-2'-O-methyl uridine phosphorothioate
  modified_base 2: mod_base = OTHER; note = 2'-fluoro modified nucleotide with phosphorothioate linkage
  modified_base 3: mod_base = OTHER; note = 2'-fluoro modified nucleotide
  modified_base 4: mod_base = OTHER; note = 2'-fluoro modified nucleotide
  modified_base 5: mod_base = OTHER; note = 2'-fluoro modified nucleotide
  modified_base 6: mod_base = OTHER; note = 2'-O-methyl modified nucleotide
  modified_base 7: mod_base = OTHER; note = 2'-fluoro modified nucleotide
  modified_base 8: mod_base = OTHER; note = 2'-O-methyl modified nucleotide
  modified_base 9: mod_base = OTHER; note = 2'-O-methyl modified nucleotide
  modified_base 10: mod_base = OTHER; note = 2'-fluoro modified nucleotide
  modified_base 11: mod_base = OTHER; note = 2'-O-methyl modified nucleotide
  modified_base 12: mod_base = OTHER; note = 2'-O-methyl modified nucleotide
  modified_base 13: mod_base = OTHER; note = 2'-O-methyl modified nucleotide
  modified_base 14: mod_base = OTHER; note = 2'-fluoro modified nucleotide
  modified_base 15: mod_base = OTHER; note = 2'-O-methyl modified nucleotide
  modified_base 16: mod_base = OTHER; note = 2'-fluoro modified nucleotide
  modified_base 17: mod_base = OTHER; note = 2'-O-methyl modified nucleotide
  modified_base 18: mod_base = OTHER; note = 2'-O-methyl modified nucleotide
  modified_base 19: mod_base = OTHER; note = 2'-fluoro modified nucleotide
  modified_base 20: mod_base = OTHER; note = 2'-O-methyl modified nucleotide with phosphorothioate linkage
  modified_base 21: mod_base = OTHER; note = 2'-O-methyl modified nucleotide with phosphorothioate linkage
  modified_base 22: mod_base = OTHER; note = 2'-O-methyl modified nucleotide
taaactgggagcaaagatatgg

SEQ ID NO: 1668 - RNA, 22 nt, synthetic construct
  source 1..22: mol_type = other RNA
  modified_base 1: mod_base = OTHER; note = 4'-O-monomethylphosphonate-2'-O-methyl uridine phosphorothioate
  modified_base 2: mod_base = OTHER; note = 2'-fluoro modified nucleotide with phosphorothioate linkage
  modified_base 3: mod_base = OTHER; note = 2'-fluoro modified nucleotide
  modified_base 4: mod_base = OTHER; note = 2'-fluoro modified nucleotide
  modified_base 5: mod_base = OTHER; note = 2'-fluoro modified nucleotide
  modified_base 6: mod_base = OTHER; note = 2'-O-methyl modified nucleotide
  modified_base 7: mod_base = OTHER; note = 2'-fluoro modified nucleotide
  modified_base 8: mod_base = OTHER; note = 2'-O-methyl modified nucleotide
  modified_base 9: mod_base = OTHER; note = 2'-O-methyl modified nucleotide
  modified_base 10: mod_base = OTHER; note = 2'-fluoro modified nucleotide
  modified_base 11: mod_base = OTHER; note = 2'-O-methyl modified nucleotide
  modified_base 12: mod_base = OTHER; note = 2'-O-methyl modified nucleotide
  modified_base 13: mod_base = OTHER; note = 2'-O-methyl modified nucleotide
  modified_base 14: mod_base = OTHER; note = 2'-fluoro modified nucleotide
  modified_base 15: mod_base = OTHER; note = 2'-O-methyl modified nucleotide
  modified_base 16: mod_base = OTHER; note = 2'-fluoro modified nucleotide
  modified_base 17: mod_base = OTHER; note = 2'-O-methyl modified nucleotide
  modified_base 18: mod_base = OTHER; note = 2'-O-methyl modified nucleotide
  modified_base 19: mod_base = OTHER; note = 2'-fluoro modified nucleotide
  modified_base 20: mod_base = OTHER; note = 2'-O-methyl modified nucleotide with phosphorothioate linkage
  modified_base 21: mod_base = OTHER; note = 2'-O-methyl modified nucleotide with phosphorothioate linkage
  modified_base 22: mod_base = OTHER; note = 2'-O-methyl modified nucleotide
tcacattggaactgagcactgg

SEQ ID NO: 1669 - RNA, 22 nt, synthetic construct
  source 1..22: mol_type = other RNA
  modified_base 1: mod_base = OTHER; note = 4'-O-monomethylphosphonate-2'-O-methyl uridine phosphorothioate
  modified_base 2: mod_base = OTHER; note = 2'-fluoro modified nucleotide with phosphorothioate linkage
  modified_base 3: mod_base = OTHER; note = 2'-fluoro modified nucleotide
  modified_base 4: mod_base = OTHER; note = 2'-fluoro modified nucleotide
  modified_base 5: mod_base = OTHER; note = 2'-fluoro modified nucleotide
  modified_base 6: mod_base = OTHER; note = 2'-O-methyl modified nucleotide
  modified_base 7: mod_base = OTHER; note = 2'-fluoro modified nucleotide
  modified_base 8: mod_base = OTHER; note = 2'-O-methyl modified nucleotide
  modified_base 9: mod_base = OTHER; note = 2'-O-methyl modified nucleotide
  modified_base 10: mod_base = OTHER; note = 2'-fluoro modified nucleotide
  modified_base 11: mod_base = OTHER; note = 2'-O-methyl modified nucleotide
  modified_base 12: mod_base = OTHER; note = 2'-O-methyl modified nucleotide
  modified_base 13: mod_base = OTHER; note = 2'-O-methyl modified nucleotide
  modified_base 14: mod_base = OTHER; note = 2'-fluoro modified nucleotide
  modified_base 15: mod_base = OTHER; note = 2'-O-methyl modified nucleotide
  modified_base 16: mod_base = OTHER; note = 2'-fluoro modified nucleotide
  modified_base 17: mod_base = OTHER; note = 2'-O-methyl modified nucleotide
  modified_base 18: mod_base = OTHER; note = 2'-O-methyl modified nucleotide
  modified_base 19: mod_base = OTHER; note = 2'-fluoro modified nucleotide
  modified_base 20: mod_base = OTHER; note = 2'-O-methyl modified nucleotide with phosphorothioate linkage
  modified_base 21: mod_base = OTHER; note = 2'-O-methyl modified nucleotide with phosphorothioate linkage
  modified_base 22: mod_base = OTHER; note = 2'-O-methyl modified nucleotide
ttttgagaaatgtcatgactgg

SEQ ID NO: 1670 - RNA, 22 nt, synthetic construct
  source 1..22: mol_type = other RNA
  modified_base 1: mod_base = OTHER; note = 4'-O-monomethylphosphonate-2'-O-methyl uridine phosphorothioate
  modified_base 2: mod_base = OTHER; note = 2'-fluoro modified nucleotide with phosphorothioate linkage
  modified_base 3: mod_base = OTHER; note = 2'-fluoro modified nucleotide
  modified_base 4: mod_base = OTHER; note = 2'-fluoro modified nucleotide
  modified_base 5: mod_base = OTHER; note = 2'-fluoro modified nucleotide
  modified_base 6: mod_base = OTHER; note = 2'-O-methyl modified nucleotide
  modified_base 7: mod_base = OTHER; note = 2'-fluoro modified nucleotide
  modified_base 8: mod_base = OTHER; note = 2'-O-methyl modified nucleotide
  modified_base 9: mod_base = OTHER; note = 2'-O-methyl modified nucleotide
  modified_base 10: mod_base = OTHER; note = 2'-fluoro modified nucleotide
  modified_base 11: mod_base = OTHER; note = 2'-O-methyl modified nucleotide
  modified_base 12: mod_base = OTHER; note = 2'-O-methyl modified nucleotide
  modified_base 13: mod_base = OTHER; note = 2'-O-methyl modified nucleotide
  modified_base 14: mod_base = OTHER; note = 2'-fluoro modified nucleotide
  modified_base 15: mod_base = OTHER; note = 2'-O-methyl modified nucleotide
  modified_base 16: mod_base = OTHER; note = 2'-fluoro modified nucleotide
  modified_base 17: mod_base = OTHER; note = 2'-O-methyl modified nucleotide
  modified_base 18: mod_base = OTHER; note = 2'-O-methyl modified nucleotide
  modified_base 19: mod_base = OTHER; note = 2'-fluoro modified nucleotide
  modified_base 20: mod_base = OTHER; note = 2'-O-methyl modified nucleotide with phosphorothioate linkage
  modified_base 21: mod_base = OTHER; note = 2'-O-methyl modified nucleotide with phosphorothioate linkage
  modified_base 22: mod_base = OTHER; note = 2'-O-methyl modified nucleotide
tgtaaaaactttgagaaatggg

SEQ ID NO: 1671 - RNA, 22 nt, synthetic construct
  source 1..22: mol_type = other RNA
  modified_base 1: mod_base = OTHER; note = 4'-O-monomethylphosphonate-2'-O-methyl uridine phosphorothioate
  modified_base 2: mod_base = OTHER; note = 2'-fluoro modified nucleotide with phosphorothioate linkage
  modified_base 3: mod_base = OTHER; note = 2'-fluoro modified nucleotide
  modified_base 4: mod_base = OTHER; note = 2'-fluoro modified nucleotide
  modified_base 5: mod_base = OTHER; note = 2'-fluoro modified nucleotide
  modified_base 6: mod_base = OTHER; note = 2'-O-methyl modified nucleotide
  modified_base 7: mod_base = OTHER; note = 2'-fluoro modified nucleotide
  modified_base 8: mod_base = OTHER; note = 2'-O-methyl modified nucleotide
  modified_base 9: mod_base = OTHER; note = 2'-O-methyl modified nucleotide
  modified_base 10: mod_base = OTHER; note = 2'-fluoro modified nucleotide
  modified_base 11: mod_base = OTHER; note = 2'-O-methyl modified nucleotide
  modified_base 12: mod_base = OTHER; note = 2'-O-methyl modified nucleotide
  modified_base 13: mod_base = OTHER; note = 2'-O-methyl modified nucleotide
  modified_base 14: mod_base = OTHER; note = 2'-fluoro modified nucleotide
  modified_base 15: mod_base = OTHER; note = 2'-O-methyl modified nucleotide
  modified_base 16: mod_base = OTHER; note = 2'-fluoro modified nucleotide
  modified_base 17: mod_base = OTHER; note = 2'-O-methyl modified nucleotide
  modified_base 18: mod_base = OTHER; note = 2'-O-methyl modified nucleotide
  modified_base 19: mod_base = OTHER; note = 2'-fluoro modified nucleotide
  modified_base 20: mod_base = OTHER; note = 2'-O-methyl modified nucleotide with phosphorothioate linkage
  modified_base 21: mod_base = OTHER; note = 2'-O-methyl modified nucleotide with phosphorothioate linkage
  modified_base 22: mod_base = OTHER; note = 2'-O-methyl modified nucleotide
tatacttcaatcactgctgagg

SEQ ID NO: 1672 - RNA, 22 nt, synthetic construct
  source 1..22: mol_type = other RNA
  modified_base 1: mod_base = OTHER; note = 4'-O-monomethylphosphonate-2'-O-methyl uridine phosphorothioate
  modified_base 2: mod_base = OTHER; note = 2'-fluoro modified nucleotide with phosphorothioate linkage
  modified_base 3: mod_base = OTHER; note = 2'-fluoro modified nucleotide
  modified_base 4: mod_base = OTHER; note = 2'-fluoro modified nucleotide
  modified_base 5: mod_base = OTHER; note = 2'-fluoro modified nucleotide
  modified_base 6: mod_base = OTHER; note = 2'-O-methyl modified nucleotide
  modified_base 7: mod_base = OTHER; note = 2'-fluoro modified nucleotide
  modified_base 8: mod_base = OTHER; note = 2'-O-methyl modified nucleotide
  modified_base 9: mod_base = OTHER; note = 2'-O-methyl modified nucleotide
  modified_base 10: mod_base = OTHER; note = 2'-fluoro modified nucleotide
  modified_base 11: mod_base = OTHER; note = 2'-O-methyl modified nucleotide
  modified_base 12: mod_base = OTHER; note = 2'-O-methyl modified nucleotide
  modified_base 13: mod_base = OTHER; note = 2'-O-methyl modified nucleotide
  modified_base 14: mod_base = OTHER; note = 2'-fluoro modified nucleotide
  modified_base 15: mod_base = OTHER; note = 2'-O-methyl modified nucleotide
  modified_base 16: mod_base = OTHER; note = 2'-fluoro modified nucleotide
  modified_base 17: mod_base = OTHER; note = 2'-O-methyl modified nucleotide
  modified_base 18: mod_base = OTHER; note = 2'-O-methyl modified nucleotide
  modified_base 19: mod_base = OTHER; note = 2'-fluoro modified nucleotide
  modified_base 20: mod_base = OTHER; note = 2'-O-methyl modified nucleotide with phosphorothioate linkage
  modified_base 21: mod_base = OTHER; note = 2'-O-methyl modified nucleotide with phosphorothioate linkage
  modified_base 22: mod_base = OTHER; note = 2'-O-methyl modified nucleotide
tgccacaaaatccacagcacgg

SEQ ID NO: 1673 - RNA, 22 nt, synthetic construct
  source 1..22: mol_type = other RNA
  modified_base 1: mod_base = OTHER; note = 4'-O-monomethylphosphonate-2'-O-methyl uridine phosphorothioate
  modified_base 2: mod_base = OTHER; note = 2'-fluoro modified nucleotide with phosphorothioate linkage
  modified_base 3: mod_base = OTHER; note = 2'-fluoro modified nucleotide
  modified_base 4: mod_base = OTHER; note = 2'-fluoro modified nucleotide
  modified_base 5: mod_base = OTHER; note = 2'-fluoro modified nucleotide
  modified_base 6: mod_base = OTHER; note = 2'-O-methyl modified nucleotide
  modified_base 7: mod_base = OTHER; note = 2'-fluoro modified nucleotide
  modified_base 8: mod_base = OTHER; note = 2'-O-methyl modified nucleotide
  modified_base 9: mod_base = OTHER; note = 2'-O-methyl modified nucleotide
  modified_base 10: mod_base = OTHER; note = 2'-fluoro modified nucleotide
  modified_base 11: mod_base = OTHER; note = 2'-O-methyl modified nucleotide
  modified_base 12: mod_base = OTHER; note = 2'-O-methyl modified nucleotide
  modified_base 13: mod_base = OTHER; note = 2'-O-methyl modified nucleotide
  modified_base 14: mod_base = OTHER; note = 2'-fluoro modified nucleotide
  modified_base 15: mod_base = OTHER; note = 2'-O-methyl modified nucleotide
  modified_base 16: mod_base = OTHER; note = 2'-fluoro modified nucleotide
  modified_base 17: mod_base = OTHER; note = 2'-O-methyl modified nucleotide
  modified_base 18: mod_base = OTHER; note = 2'-O-methyl modified nucleotide
  modified_base 19: mod_base = OTHER; note = 2'-fluoro modified nucleotide
  modified_base 20: mod_base = OTHER; note = 2'-O-methyl modified nucleotide with phosphorothioate linkage
  modified_base 21: mod_base = OTHER; note = 2'-O-methyl modified nucleotide with phosphorothioate linkage
  modified_base 22: mod_base = OTHER; note = 2'-O-methyl modified nucleotide
tagccacaaaatccacagcagg

SEQ ID NO: 1674 - RNA, 22 nt, synthetic construct
  source 1..22: mol_type = other RNA
  modified_base 1: mod_base = OTHER; note = 4'-O-monomethylphosphonate-2'-O-methyl uridine phosphorothioate
  modified_base 2: mod_base = OTHER; note = 2'-fluoro modified nucleotide with phosphorothioate linkage
  modified_base 3: mod_base = OTHER; note = 2'-fluoro modified nucleotide
  modified_base 4: mod_base = OTHER; note = 2'-fluoro modified nucleotide
  modified_base 5: mod_base = OTHER; note = 2'-fluoro modified nucleotide
  modified_base 6: mod_base = OTHER; note = 2'-O-methyl modified nucleotide
  modified_base 7: mod_base = OTHER; note = 2'-fluoro modified nucleotide
  modified_base 8: mod_base = OTHER; note = 2'-O-methyl modified nucleotide
  modified_base 9: mod_base = OTHER; note = 2'-O-methyl modified nucleotide
  modified_base 10: mod_base = OTHER; note = 2'-fluoro modified nucleotide
  modified_base 11: mod_base = OTHER; note = 2'-O-methyl modified nucleotide
  modified_base 12: mod_base = OTHER; note = 2'-O-methyl modified nucleotide
  modified_base 13: mod_base = OTHER; note = 2'-O-methyl modified nucleotide
  modified_base 14: mod_base = OTHER; note = 2'-fluoro modified nucleotide
  modified_base 15: mod_base = OTHER; note = 2'-O-methyl modified nucleotide
  modified_base 16: mod_base = OTHER; note = 2'-fluoro modified nucleotide
  modified_base 17: mod_base = OTHER; note = 2'-O-methyl modified nucleotide
  modified_base 18: mod_base = OTHER; note = 2'-O-methyl modified nucleotide
  modified_base 19: mod_base = OTHER; note = 2'-fluoro modified nucleotide
  modified_base 20: mod_base = OTHER; note = 2'-O-methyl modified nucleotide with phosphorothioate linkage
  modified_base 21: mod_base = OTHER; note = 2'-O-methyl modified nucleotide with phosphorothioate linkage
  modified_base 22: mod_base = OTHER; note = 2'-O-methyl modified nucleotide
tcactaacaacttctgaacagg

SEQ ID NO: 1675 - RNA, 22 nt, synthetic construct
  source 1..22: mol_type = other RNA
  modified_base 1: mod_base = OTHER; note = 4'-O-monomethylphosphonate-2'-O-methyl uridine phosphorothioate
  modified_base 2: mod_base = OTHER; note = 2'-fluoro modified nucleotide with phosphorothioate linkage
  modified_base 3: mod_base = OTHER; note = 2'-fluoro modified nucleotide
  modified_base 4: mod_base = OTHER; note = 2'-fluoro modified nucleotide
  modified_base 5: mod_base = OTHER; note = 2'-fluoro modified nucleotide
  modified_base 6: mod_base = OTHER; note = 2'-O-methyl modified nucleotide
  modified_base 7: mod_base = OTHER; note = 2'-fluoro modified nucleotide
  modified_base 8: mod_base = OTHER; note = 2'-O-methyl modified nucleotide
  modified_base 9: mod_base = OTHER; note = 2'-O-methyl modified nucleotide
  modified_base 10: mod_base = OTHER; note = 2'-fluoro modified nucleotide
  modified_base 11: mod_base = OTHER; note = 2'-O-methyl modified nucleotide
  modified_base 12: mod_base = OTHER; note = 2'-O-methyl modified nucleotide
  modified_base 13: mod_base = OTHER; note = 2'-O-methyl modified nucleotide
  modified_base 14: mod_base = OTHER; note = 2'-fluoro modified nucleotide
  modified_base 15: mod_base = OTHER; note = 2'-O-methyl modified nucleotide
  modified_base 16: mod_base = OTHER; note = 2'-fluoro modified nucleotide
  modified_base 17: mod_base = OTHER; note = 2'-O-methyl modified nucleotide
  modified_base 18: mod_base = OTHER; note = 2'-O-methyl modified nucleotide
  modified_base 19: mod_base = OTHER; note = 2'-fluoro modified nucleotide
  modified_base 20: mod_base = OTHER; note = 2'-O-methyl modified nucleotide with phosphorothioate linkage
  modified_base 21: mod_base = OTHER; note = 2'-O-methyl modified nucleotide with phosphorothioate linkage
  modified_base 22: mod_base = OTHER; note = 2'-O-methyl modified nucleotide
ttagcaaatcactaacaactgg

SEQ ID NO: 1676 - RNA, 22 nt, synthetic construct
  source 1..22: mol_type = other RNA
  modified_base 1: mod_base = OTHER; note = 4'-O-monomethylphosphonate-2'-O-methyl uridine phosphorothioate
  modified_base 2: mod_base = OTHER; note = 2'-fluoro modified nucleotide with phosphorothioate linkage
  modified_base 3: mod_base = OTHER; note = 2'-fluoro modified nucleotide
  modified_base 4: mod_base = OTHER; note = 2'-fluoro modified nucleotide
  modified_base 5: mod_base = OTHER; note = 2'-fluoro modified nucleotide
  modified_base 6: mod_base = OTHER; note = 2'-O-methyl modified nucleotide
  modified_base 7: mod_base = OTHER; note = 2'-fluoro modified nucleotide
  modified_base 8: mod_base = OTHER; note = 2'-O-methyl modified nucleotide
  modified_base 9: mod_base = OTHER; note = 2'-O-methyl modified nucleotide
  modified_base 10: mod_base = OTHER; note = 2'-fluoro modified nucleotide
  modified_base 11: mod_base = OTHER; note = 2'-O-methyl modified nucleotide
  modified_base 12: mod_base = OTHER; note = 2'-O-methyl modified nucleotide
  modified_base 13: mod_base = OTHER; note = 2'-O-methyl modified nucleotide
  modified_base 14: mod_base = OTHER; note = 2'-fluoro modified nucleotide
  modified_base 15: mod_base = OTHER; note = 2'-O-methyl modified nucleotide
  modified_base 16: mod_base = OTHER; note = 2'-fluoro modified nucleotide
  modified_base 17: mod_base = OTHER; note = 2'-O-methyl modified nucleotide
  modified_base 18: mod_base = OTHER; note = 2'-O-methyl modified nucleotide
  modified_base 19: mod_base = OTHER; note = 2'-fluoro modified nucleotide
  modified_base 20: mod_base = OTHER; note = 2'-O-methyl modified nucleotide with phosphorothioate linkage
  modified_base 21: mod_base = OTHER; note = 2'-O-methyl modified nucleotide with phosphorothioate linkage
  modified_base 22: mod_base = OTHER; note = 2'-O-methyl modified nucleotide
ttagacagtatcattaaaaggg

SEQ ID NO: 1677 - DNA, 3215 bp, Homo sapiens
  source 1..3215: mol_type = genomic DNA
aggagaaggagaaggaggaggactaggaggaggaggacggcgacgaccagaaggggcccaagagagggggcgagcgaccgagcgccgcgacgcggaagtgaggtgcgtgcgggctgcagcgcagaccccggcccggcccctccgagagcgtcctgggcgctccctcacgccttgccttcaagccttctgcctttccaccctcgtgagcggagaactgggagtggccattcgacgacagtgtggtgtaaaggaattcattagccatggatgtattcatgaaaggactttcaaaggccaaggagggagttgtggctgctgctgagaaaaccaaacagggtgtggcagaagcagcaggaaagacaaaagagggtgttctctatgtaggctccaaaaccaaggagggagtggtgcatggtgtggcaacagtggctgagaagaccaaagagcaagtgacaaatgttggaggagcagtggtgacgggtgtgacagcagtagcccagaagacagtggagggagcagggagcattgcagcagccactggctttgtcaaaaaggaccagttgggcaagaatgaagaaggagccccacaggaaggaattctggaagatatgcctgtggatcctgacaatgaggcttatgaaatgccttctgaggaagggtatcaagactacgaacctgaagcctaagaaatatctttgctcccagtttcttgagatctgctgacagatgttccatcctgtacaagtgctcagttccaatgtgcccagtcatgacatttctcaaagtttttacagtgtatctcgaagtcttccatcagcagtgattgaagtatctgtacctgcccccactcagcatttcggtgcttccctttcactgaagtgaatacatggtagcagggtctttgtgtgctgtggattttgtggcttcaatctacgatgttaaaacaaattaaaaacacctaagtgactaccacttatttctaaatcctcactatttttttgttgctgttgttcagaagttgttagtgatttgctatcatatattataagatttttaggtgtcttttaatgatactgtctaagaataatgacgtattgtgaaatttgttaatatatataatacttaaaaatatgtgagcatgaaactatgcacctataaatactaaatatgaaattttaccattttgcgatgtgttttattcacttgtgtttgtatataaatggtgagaattaaaataaaacgttatctcattgcaaaaatattttatttttatcccatctcactttaataataaaaatcatgcttataagcaacatgaattaagaactgacacaaaggacaaaaatataaagttattaatagccatttgaagaaggaggaattttagaagaggtagagaaaatggaacattaaccctacactcggaattccctgaagcaacactgccagaagtgtgttttggtatgcactggttccttaagtggctgtgattaattattgaaagtggggtgttgaagaccccaactactattgtagagtggtctatttctcccttcaatcctgtcaatgtttgctttacgtattttggggaactgttgtttgatgtgtatgtgtttataattgttatacatttttaattgagccttttattaacatatattgttatttttgtctcgaaataattttttagttaaaatctattttgtctgatattggtgtgaatgctgtacctttctgacaataaataatattcgaccatgaataaaaaaaaaaaaaaagtgggttcccgggaactaagcagtgtagaagatgattttgactacaccctccttagagagccataagacacattagcacatattagcacattcaaggctctgagagaatgtggttaactttgtttaactcagcattcctcactttttttttttaatcatcagaaattctctctctctctctctctttttctctcgctctctttttttttttttttttacaggaaatgcctttaaacatcgttggaactaccagagtcaccttaaaggagatcaattctctagactgataaaaatttcatggcctcctttaaatgttgccaaatatatgaattctaggatttttccttaggaaaggtttttctctttcagggaagatctattaactccccatgggtgctgaaaataaacttgatggtgaaaaactctgtataaattaatttaaaaattatttggtttctctttttaattattctggggcatagtcatttctaaaagtcactagtagaaagtataatttcaagacagaatattctagacatgctagcagtttatatgtattcatgagtaatgtgatatatattgggcgctggtgaggaaggaaggaggaatgagtgactataaggatggttaccatagaaacttccttttttacctaattgaagagagactactacagagtgctaagctgcatgtgtcatcttacactagagagaaatggtaagtttcttgttttatttaagttatgtttaagcaaggaaaggatttgttattgaacagtatatttcaggaaggttagaaagtggcggttaggatatattttaaatctacctaaagcagcatattttaaaaatttaaaagtattggtattaaattaagaaatagaggacagaactagactgatagcagtgacctagaacaatttgagattaggaaagttgtgaccatgaatttaaggatttatgtggatacaaattctcctttaaagtgtttcttcccttaatatttatctgacggtaatttttgagcagtgaattactttatatatcttaatagtttatttgggaccaaacacttaaacaaaaagttctttaagtcatataagccttttcaggaagcttgtctcatattcactcccgagacattcacctgccaagtggcctgaggatcaatccagtcctaggtttattttgcagacttacattctcccaagttattcagcctcatatgactccacggtcggctttaccaaaacagttcagagtgcactttggcacacaattgggaacagaacaatctaatgtgtggtttggtattccaagtggggtctttttcagaatctctgcactagtgtgagatgcaaacatgtttcctcatctttctggcttatccagtatgtagctatttgtgacataataaatatatacatatatgaaaata

SEQ ID NO: 1678 - DNA, 1304 bp, Mus musculus
  source 1..1304: mol_type = genomic DNA
agatacccacagccctcacgcaccgcacctccaaccaacccgtcccctccctaggaagaggagcgaaggcacgaggcaggcgaggggcggggagaggcgctgacaaatcagctgcgggggcgacgtgaaggagccagggagccagagcgcccggcagcaggcagcagacggcaggagaccagcaggtgttccccctgcccctgcctgcccttgcctctttcattgaaattagattggggaaaacaggaagaatcggagttcttcagaagcctagggagccgtgtggagcaaaaatacatctttagccatggatgtgttcatgaaaggactttcaaaggccaaggagggagttgtggctgctgctgagaaaaccaagcagggtgtggcagaggcagctggaaagacaaaagagggagtcctctatgtaggttccaaaactaaggaaggagtggttcatggagtgacaacagtggctgagaagaccaaagagcaagtgacaaatgttggaggagcagtggtgactggtgtgacagcagtcgctcagaagacagtggagggagctgggaatatagctgctgccactggctttgtcaagaaggaccagatgggcaagggtgaggaggggtacccacaggaaggaatcctggaagacatgcctgtggatcctggcagtgaggcttatgaaatgccttcagaggaaggctaccaagactatgagcctgaagcctaagaatgtcattgcacccaatctcctaagatctgccggctgctcttccatggcgtacaagtgctcagttccaatgtgcccagtcatgaccttttctcaaagctgtacagtgtgtttcaaagtcttccatcagcagtgatcggcgtcctgtacctgcccctcagcatcccggtgctcccctctcactacagtgaaaacctggtagcagggtcttgtgtgctgtggatattgttgtggcttcacacttaaattgttagaagaaacttaaaacacctaagtgactaccacttatttctaaatcttcatcgttttctttttgttgctgttcttaagaagttgtgatttgctccaagagttttaggtgtcctgaatgactctttctgtctaagaatgatgtgttgtgaaatttgttaatatatattttaaaattatgtgagcatgagactatgcacctataaatattaatttatgaattttacagttttgtgatgtgttttattaacttgtgtttgtatataaatggtggaaaataaaataaaatattatccattgcaaaatcaaaaaaaaaaaaaaaaaa

SEQ ID NO: 1679 - DNA, 3094 bp, Macaca fascicularis
  source 1..3094: mol_type = genomic DNA
ccttgcgcggccaggcaggcggctggaattggtggttcaccctgcgccccctgccccatccccatccgagatagggaacgaagagcacgctgcagggaaagcagcgagcgctgggaggggagcgtggagaggcgctgacaaatcagcggtgggggcggagagccgaggagaaggagaaggaggaggacgaggaggaggaggacggcgacgaccagaaggggcccgagagagggggcgagcgaccgagcgccgcgacgcgggagtgaggtgcgtgcgggctgcagcgcagaccccggcccggcccctccgagagcgtcctgagcgctccctcacgccttcccttcaaaccttctgcctttttctccatcctcgtgagcggagaactgggagtggccattcgacgacagtgtggtgtaaaggaattcattagccatggatgtattcatgaaaggactttcaaaggccaaggagggagttgtggctgctgctgagaaaaccaaacagggtgtggcagaagcagcaggaaagacaaaagagggtgttctctatgtaggctccaaaaccaaggagggagtggtgcacggtgtggcaacagtggctgagaagaccaaagagcaagtgacaaatgttggaggagcggtggtgacgggtgtgacagcagtagcccagaagacagtggagggagcagggagcattgcagcagccactggcttcatcaaaaaggaccagttgggcaagaatgaagaaggagccccacaggaaggaattctacaagatatgcctgtggatcctgacaatgaggcttatgaaatgccttctgaggaagggtatcaagactacgaacctgaagcctaagaaatatctttgctcccagtttcttgagatctgctgacagacgttccatcttgtacaagtgctcagttccaatgtgcccagtcatgacatttctcaaagtttttacagtatattttgaagtcttccatcagcagtgattgaagtatctgtacctgcccccattcagcatttcggtgcttccctttcactgaagtgaatacatggtagcagggtctttgtgtgctgtggattttgtggcttcaatctatgatgttaaaacaatttaaaaacacctaagtgactaccacttatttctaaatcctcactatttttttgttgctgttgttcagaagttgttagtgatttgctatcgtatattataagatttttaggtgtcttttaatgatactgtctaagaataatgatgtattgtgaaatttgttaatatatataatacttaaaagtatgtgagcatgaaactatgcacctataaatactaactatgaaattttaccgttttgtgatgtgttttattaacttgtgtttgtatataaatggtgagaattaaaataaaatgtcgtctcattgcaaacaaaaatttatttttatcccatctcactttaataataaaaatcttgcttataagcaacatgcattgagaactgacacaatggacataaagttattaataggcatttgaagaaggaggaattttagaagaggtagagaaaatggaacattaaccctacactgggaattccctgaagcagcactgccagaagtgtgttttgtggtgccttaagtggctgtgataaaaaaaaaaaaaagtgggctccagggaacgaagcagtgtaaaagatgattttgactacatcctccttagagatccatgagacactttagcacatattagcacattcaaggctctgagacaatgtggttaacttagtttaactcagcagtccccactaaaaaaaaaaaaatcatcaaaaattctctctctctattcctttttctctcgctccccttttttccaggaaatgcctttaaacacctttgggaactatcaggatcaccttaaagaagatcagttctccagactgataaaaatttcatgatctcttttaaatgttgccaaatatatgaattctaggatttttccttgggaaaggtttttctctttcagggaagatctattaactccccatgggtgctgaaaataaacttgatggtgaaaaattctatataaattaatttaaaatttttttggtttctctttttaattattctggggcatagtcatttttaaaagtcactagtagaaagtataatttcaagacagaatattctagacatgctagcagtttatatgtattcatgagtaatgtgatatatattgggcactggtgaggcaggaaggaggaatgagtgactataaggatggttaccatagaaacttccttttttacctaattgaaaagcgactactacagagtgctaagctgcatgtgtcatcttacactggagagaaatggtaagtttcttgttttatttaagttatgtttaagcaaggaaaggattttttattgaacagtatatttcaggaaggttagaaaatagctgttaggatatattttaaatctacctaaagcagcatattttaaaaaattagaagtattggcattaaatgaagaaatagaggacaaaactagactgacagcaatgacccagaacattttgagattagtaaagttgtgaccatgaatttagggatttatgtggatacaaattctcctttaaagtgtttcttcccttaatatttatctggtagttatttatgagcagtgaattattttgtagtttatatatcttaatagtttatttgggaccaagcacttaacaaaaagttctataagtcatagaagccttttcaggaagcttgtctcacattcattcctgagactttcacctgccaagtggcctgaggatcaatccggtcctaggtttattttgcagacatacattctcccaagttattcagcctcatatgactccacagtgggctttaccaaaacagttcagagtgcactttggcacacaattgggagcagaacaatctaatgtgtggtttggtattccaagtggggtctttttcagaatctctccactagtgtgagatgcaaatatgtttcctcatttttctggctcatccagtatgtagctttttgtgacataataaatatatacatatatgaaaata

SEQ ID NO: 1680 - RNA, 16 nt, synthetic construct
  source 1..16: mol_type = other RNA
gcagccgaaaggctgc

SEQ ID NO: 1681 - RNA, 20 nt, synthetic construct
  source 1..20: mol_type = other RNA
cagtcatgacatttctcaaa

SEQ ID NO: 1682 - RNA, 20 nt, synthetic construct
  source 1..20: mol_type = other RNA
  modified_base 1: mod_base = OTHER; note O-((2R,3R,4R,5S)-5-(4-amino-2-oxopyrimidin-1(2H)-yl)-2-(hyd roxymethyl)-4-((2-(2-palmitamidoethoxy)ethoxy)methoxy)tetra hydrofuran-3-yl) O,O-dihydrogen phosphorothioate
  modified_base 2: mod_base = OTHER; note = 2'-O-methyl modified nucleotide
  modified_base 3: mod_base = OTHER; note = 2'-fluoro modified nucleotide
  modified_base 4: mod_base = OTHER; note = 2'-O-methyl modified nucleotide
  modified_base 5: mod_base = OTHER; note = 2'-fluoro modified nucleotide
  modified_base 6: mod_base = OTHER; note = 2'-O-methyl modified nucleotide
  modified_base 7: mod_base = OTHER; note = 2'-O-methyl modified nucleotide
  modified_base 8: mod_base = OTHER; note = 2'-fluoro modified nucleotide
  modified_base 9: mod_base = OTHER; note = 2'-O-methyl modified nucleotide
  modified_base 10: mod_base = OTHER; note = 2'-fluoro modified nucleotide
  modified_base 11: mod_base = OTHER; note = 2'-O-methyl modified nucleotide
  modified_base 12: mod_base = OTHER; note = 2'-fluoro modified nucleotide
  modified_base 13: mod_base = OTHER; note = 2'-fluoro modified nucleotide
  modified_base 14: mod_base = OTHER; note = 2'-O-methyl modified nucleotide
  modified_base 15: mod_base = OTHER; note = 2'-fluoro modified nucleotide
  modified_base 16: mod_base = OTHER; note = 2'-O-methyl modified nucleotide
  modified_base 17: mod_base = OTHER; note = 2'-fluoro modified nucleotide
  modified_base 18: mod_base = OTHER; note = 2'-O-methyl modified nucleotide with phosphorothioate linkage
  modified_base 19: mod_base = OTHER; note = 2'-O-methyl modified nucleotide with phosphorothioate linkage
  modified_base 20: mod_base = OTHER; note = 2'-O-methyl modified nucleotide
cagtcatgacatttctcaaa

SEQ ID NO: 1683 - RNA, 19 nt, synthetic construct
  source 1..19: mol_type = other RNA
ttcatgaaaggactttcaa

SEQ ID NO: 1684 - RNA, 19 nt, synthetic construct
  source 1..19: mol_type = other RNA
tcatgaaaggactttcaaa

SEQ ID NO: 1685 - RNA, 19 nt, synthetic construct
  source 1..19: mol_type = other RNA
catgaaaggactttcaaag

SEQ ID NO: 1686 - RNA, 19 nt, synthetic construct
  source 1..19: mol_type = other RNA
atgaaaggactttcaaagg

SEQ ID NO: 1687 - RNA, 19 nt, synthetic construct
  source 1..19: mol_type = other RNA
tgaaaggactttcaaaggc

SEQ ID NO: 1688 - RNA, 19 nt, synthetic construct
  source 1..19: mol_type = other RNA
gaaaggactttcaaaggcc

SEQ ID NO: 1689 - RNA, 19 nt, synthetic construct
  source 1..19: mol_type = other RNA
ggagggagttgtggctgct

SEQ ID NO: 1690 - RNA, 19 nt, synthetic construct
  source 1..19: mol_type = other RNA
gggagttgtggctgctgct

SEQ ID NO: 1691 - RNA, 19 nt, synthetic construct
  source 1..19: mol_type = other RNA
ggagttgtggctgctgctg

SEQ ID NO: 1692 - RNA, 19 nt, synthetic construct
  source 1..19: mol_type = other RNA
gagttgtggctgctgctga

SEQ ID NO: 1693 - RNA, 19 nt, synthetic construct
  source 1..19: mol_type = other RNA
gttgtggctgctgctgaga

SEQ ID NO: 1694 - RNA, 19 nt, synthetic construct
  source 1..19: mol_type = other RNA
ttgtggctgctgctgagaa

SEQ ID NO: 1695 - RNA, 19 nt, synthetic construct
  source 1..19: mol_type = other RNA
tgtggctgctgctgagaaa

SEQ ID NO: 1696 - RNA, 19 nt, synthetic construct
  source 1..19: mol_type = other RNA
gtggctgctgctgagaaaa

SEQ ID NO: 1697 - RNA, 19 nt, synthetic construct
  source 1..19: mol_type = other RNA
tggctgctgctgagaaaac

SEQ ID NO: 1698 - RNA, 19 nt, synthetic construct
  source 1..19: mol_type = other RNA
ggctgctgctgagaaaacc

SEQ ID NO: 1699 - RNA, 19 nt, synthetic construct
  source 1..19: mol_type = other RNA
caacagtggctgagaagac

SEQ ID NO: 1700 - RNA, 19 nt, synthetic construct
  source 1..19: mol_type = other RNA
aacagtggctgagaagacc

SEQ ID NO: 1701 - RNA, 19 nt, synthetic construct
  source 1..19: mol_type = other RNA
acagtggctgagaagacca

SEQ ID NO: 1702 - RNA, 19 nt, synthetic construct
  source 1..19: mol_type = other RNA
cagtggctgagaagaccaa

SEQ ID NO: 1703 - RNA, 19 nt, synthetic construct
  source 1..19: mol_type = other RNA
agtggctgagaagaccaaa

SEQ ID NO: 1704 - RNA, 19 nt, synthetic construct
  source 1..19: mol_type = other RNA
gtggctgagaagaccaaag

SEQ ID NO: 1705 - RNA, 19 nt, synthetic construct
  source 1..19: mol_type = other RNA
tggctgagaagaccaaaga

SEQ ID NO: 1706 - RNA, 19 nt, synthetic construct
  source 1..19: mol_type = other RNA
ggctgagaagaccaaagag

SEQ ID NO: 1707 - RNA, 19 nt, synthetic construct
  source 1..19: mol_type = other RNA
gctgagaagaccaaagagc

SEQ ID NO: 1708 - RNA, 19 nt, synthetic construct
  source 1..19: mol_type = other RNA
ctgagaagaccaaagagca

SEQ ID NO: 1709 - RNA, 19 nt, synthetic construct
  source 1..19: mol_type = other RNA
tgagaagaccaaagagcaa

SEQ ID NO: 1710 - RNA, 19 nt, synthetic construct
  source 1..19: mol_type = other RNA
gagaagaccaaagagcaag

SEQ ID NO: 1711 - RNA, 19 nt, synthetic construct
  source 1..19: mol_type = other RNA
agaagaccaaagagcaagt

SEQ ID NO: 1712 - RNA, 19 nt, synthetic construct
  source 1..19: mol_type = other RNA
gaagaccaaagagcaagtg

SEQ ID NO: 1713 - RNA, 19 nt, synthetic construct
  source 1..19: mol_type = other RNA
aagaccaaagagcaagtga

SEQ ID NO: 1714 - RNA, 19 nt, synthetic construct
  source 1..19: mol_type = other RNA
agaccaaagagcaagtgac

SEQ ID NO: 1715 - RNA, 19 nt, synthetic construct
  source 1..19: mol_type = other RNA
gaccaaagagcaagtgaca

SEQ ID NO: 1716 - RNA, 19 nt, synthetic construct
  source 1..19: mol_type = other RNA
accaaagagcaagtgacaa

SEQ ID NO: 1717 - RNA, 19 nt, synthetic construct
  source 1..19: mol_type = other RNA
ccaaagagcaagtgacaaa

SEQ ID NO: 1718 - RNA, 19 nt, synthetic construct
  source 1..19: mol_type = other RNA
caaagagcaagtgacaaat

SEQ ID NO: 1719 - RNA, 19 nt, synthetic construct
  source 1..19: mol_type = other RNA
aaagagcaagtgacaaatg

SEQ ID NO: 1720 - RNA, 19 nt, synthetic construct
  source 1..19: mol_type = other RNA
aagagcaagtgacaaatgt

SEQ ID NO: 1721 - RNA, 19 nt, synthetic construct
  source 1..19: mol_type = other RNA
agagcaagtgacaaatgtt

SEQ ID NO: 1722 - RNA, 19 nt, synthetic construct
  source 1..19: mol_type = other RNA
gagcaagtgacaaatgttg

SEQ ID NO: 1723 - RNA, 19 nt, synthetic construct
  source 1..19: mol_type = other RNA
agcaagtgacaaatgttgg

SEQ ID NO: 1724 - RNA, 19 nt, synthetic construct
  source 1..19: mol_type = other RNA
gcaagtgacaaatgttgga

SEQ ID NO: 1725 - RNA, 19 nt, synthetic construct
  source 1..19: mol_type = other RNA
caagtgacaaatgttggag

SEQ ID NO: 1726 - RNA, 19 nt, synthetic construct
  source 1..19: mol_type = other RNA
aagtgacaaatgttggagg

SEQ ID NO: 1727 - RNA, 19 nt, synthetic construct
  source 1..19: mol_type = other RNA
agtgacaaatgttggagga

SEQ ID NO: 1728 - RNA, 19 nt, synthetic construct
  source 1..19: mol_type = other RNA
gtgacaaatgttggaggag

SEQ ID NO: 1729 - RNA, 19 nt, synthetic construct
  source 1..19: mol_type = other RNA
tgacaaatgttggaggagc

SEQ ID NO: 1730 - RNA, 19 nt, synthetic construct
  source 1..19: mol_type = other RNA
gtacaagtgctcagttcca

SEQ ID NO: 1731 - RNA, 19 nt, synthetic construct
  source 1..19: mol_type = other RNA
tacaagtgctcagttccaa

SEQ ID NO: 1732 - RNA, 19 nt, synthetic construct
  source 1..19: mol_type = other RNA
acaagtgctcagttccaat

SEQ ID NO: 1733 - RNA, 19 nt, synthetic construct
  source 1..19: mol_type = other RNA
caagtgctcagttccaatg

SEQ ID NO: 1734 - RNA, 19 nt, synthetic construct
  source 1..19: mol_type = other RNA
aagtgctcagttccaatgt

SEQ ID NO: 1735 - RNA, 19 nt, synthetic construct
  source 1..19: mol_type = other RNA
agtgctcagttccaatgtg

SEQ ID NO: 1736 - RNA, 19 nt, synthetic construct
  source 1..19: mol_type = other RNA
gtgctcagttccaatgtgc

SEQ ID NO: 1737 - RNA, 19 nt, synthetic construct
  source 1..19: mol_type = other RNA
tgctcagttccaatgtgcc

SEQ ID NO: 1738 - RNA, 19 nt, synthetic construct
  source 1..19: mol_type = other RNA
gctcagttccaatgtgccc

SEQ ID NO: 1739 - RNA, 19 nt, synthetic construct
  source 1..19: mol_type = other RNA
ctcagttccaatgtgccca

SEQ ID NO: 1740 - RNA, 19 nt, synthetic construct
  source 1..19: mol_type = other RNA
tcagttccaatgtgcccag

SEQ ID NO: 1741 - RNA, 19 nt, synthetic construct
  source 1..19: mol_type = other RNA
cagttccaatgtgcccagt

SEQ ID NO: 1742 - RNA, 19 nt, synthetic construct
  source 1..19: mol_type = other RNA
agttccaatgtgcccagtc

SEQ ID NO: 1743 - RNA, 19 nt, synthetic construct
  source 1..19: mol_type = other RNA
gttccaatgtgcccagtca

SEQ ID NO: 1744 - RNA, 19 nt, synthetic construct
  source 1..19: mol_type = other RNA
ttccaatgtgcccagtcat

SEQ ID NO: 1745 - RNA, 19 nt, synthetic construct
  source 1..19: mol_type = other RNA
tccaatgtgcccagtcatg

SEQ ID NO: 1746 - RNA, 19 nt, synthetic construct
  source 1..19: mol_type = other RNA
ccaatgtgcccagtcatga

SEQ ID NO: 1747 - RNA, 19 nt, synthetic construct
  source 1..19: mol_type = other RNA
caatgtgcccagtcatgac

SEQ ID NO: 1748 - RNA, 19 nt, synthetic construct
  source 1..19: mol_type = other RNA
aagtcttccatcagcagtg

SEQ ID NO: 1749 - RNA, 19 nt, synthetic construct
  source 1..19: mol_type = other RNA
agtcttccatcagcagtga

SEQ ID NO: 1750 - RNA, 19 nt, synthetic construct
  source 1..19: mol_type = other RNA
gtcttccatcagcagtgat

SEQ ID NO: 1751 - RNA, 19 nt, synthetic construct
  source 1..19: mol_type = other RNA
aaaacacctaagtgactac

SEQ ID NO: 1752 - RNA, 19 nt, synthetic construct
  source 1..19: mol_type = other RNA
aaacacctaagtgactacc

SEQ ID NO: 1753 - RNA, 19 nt, synthetic construct
  source 1..19: mol_type = other RNA
aacacctaagtgactacca

SEQ ID NO: 1754 - RNA, 19 nt, synthetic construct
  source 1..19: mol_type = other RNA
acacctaagtgactaccac

SEQ ID NO: 1755 - RNA, 19 nt, synthetic construct
  source 1..19: mol_type = other RNA
cacctaagtgactaccact

SEQ ID NO: 1756 - RNA, 19 nt, synthetic construct
  source 1..19: mol_type = other RNA
acctaagtgactaccactt

SEQ ID NO: 1757 - RNA, 19 nt, synthetic construct
  source 1..19: mol_type = other RNA
cctaagtgactaccactta

SEQ ID NO: 1758 - RNA, 19 nt, synthetic construct
  source 1..19: mol_type = other RNA
ctaagtgactaccacttat

SEQ ID NO: 1759 - RNA, 19 nt, synthetic construct
  source 1..19: mol_type = other RNA
taagtgactaccacttatt

SEQ ID NO: 1760 - RNA, 19 nt, synthetic construct
  source 1..19: mol_type = other RNA
aagtgactaccacttattt

SEQ ID NO: 1761 - RNA, 19 nt, synthetic construct
  source 1..19: mol_type = other RNA
agtgactaccacttatttc

SEQ ID NO: 1762 - RNA, 19 nt, synthetic construct
  source 1..19: mol_type = other RNA
gtgactaccacttatttct

SEQ ID NO: 1763 - RNA, 19 nt, synthetic construct
  source 1..19: mol_type = other RNA
tgactaccacttatttcta

SEQ ID NO: 1764 - RNA, 19 nt, synthetic construct
  source 1..19: mol_type = other RNA
gactaccacttatttctaa

SEQ ID NO: 1765 - RNA, 19 nt, synthetic construct
  source 1..19: mol_type = other RNA
actaccacttatttctaaa

SEQ ID NO: 1766 - RNA, 19 nt, synthetic construct
  source 1..19: mol_type = other RNA
ctaccacttatttctaaat

SEQ ID NO: 1767 - RNA, 19 nt, synthetic construct
  source 1..19: mol_type = other RNA
taccacttatttctaaatc

SEQ ID NO: 1768 - RNA, 19 nt, synthetic construct
  source 1..19: mol_type = other RNA
ttgtgaaatttgttaatat

SEQ ID NO: 1769 - RNA, 19 nt, synthetic construct
  source 1..19: mol_type = other RNA
tgtgaaatttgttaatata

SEQ ID NO: 1770 - RNA, 19 nt, synthetic construct
  source 1..19: mol_type = other RNA
gtgaaatttgttaatatat

SEQ ID NO: 1771 - RNA, 19 nt, synthetic construct
  source 1..19: mol_type = other RNA
tgaaatttgttaatatata

SEQ ID NO: 1772 - RNA, 19 nt, synthetic construct
  source 1..19: mol_type = other RNA
gaaatttgttaatatatat

SEQ ID NO: 1773 - RNA, 19 nt, synthetic construct
  source 1..19: mol_type = other RNA
acttgtgtttgtatataaa

SEQ ID NO: 1774 - RNA, 19 nt, synthetic construct
  source 1..19: mol_type = other RNA
cttgtgtttgtatataaat

SEQ ID NO: 1775 - RNA, 19 nt, synthetic construct
  source 1..19: mol_type = other RNA
ttgtgtttgtatataaatg

SEQ ID NO: 1776 - RNA, 19 nt, synthetic construct
  source 1..19: mol_type = other RNA
tgtgtttgtatataaatgg

SEQ ID NO: 1777 - RNA, 19 nt, synthetic construct
  source 1..19: mol_type = other RNA
gtgtttgtatataaatggt

SEQ ID NO: 1778 - RNA, 19 nt, synthetic construct
  source 1..19: mol_type = other RNA
tgtttgtatataaatggtg

SEQ ID NO: 1779 - RNA, 19 nt, synthetic construct
  source 1..19: mol_type = other RNA
tgtggtgtaaaggaattca

SEQ ID NO: 1780 - RNA, 19 nt, synthetic construct
  source 1..19: mol_type = other RNA
gtggtgtaaaggaattcat

SEQ ID NO: 1781 - RNA, 19 nt, synthetic construct
  source 1..19: mol_type = other RNA
tggtgtaaaggaattcatt

SEQ ID NO: 1782 - RNA, 19 nt, synthetic construct
  source 1..19: mol_type = other RNA
ggtgtaaaggaattcatta

SEQ ID NO: 1783 - RNA, 19 nt, synthetic construct
  source 1..19: mol_type = other RNA
gtgtaaaggaattcattag

SEQ ID NO: 1784 - RNA, 19 nt, synthetic construct
  source 1..19: mol_type = other RNA
tgtaaaggaattcattagc

SEQ ID NO: 1785 - RNA, 19 nt, synthetic construct
  source 1..19: mol_type = other RNA
gtaaaggaattcattagcc

SEQ ID NO: 1786 - RNA, 19 nt, synthetic construct
  source 1..19: mol_type = other RNA
taaaggaattcattagcca

SEQ ID NO: 1787 - RNA, 19 nt, synthetic construct
  source 1..19: mol_type = other RNA
aaaggaattcattagccat

SEQ ID NO: 1788 - RNA, 19 nt, synthetic construct
  source 1..19: mol_type = other RNA
aaggaattcattagccatg

SEQ ID NO: 1789 - RNA, 19 nt, synthetic construct
  source 1..19: mol_type = other RNA
aggaattcattagccatgg

SEQ ID NO: 1790 - RNA, 19 nt, synthetic construct
  source 1..19: mol_type = other RNA
ggaattcattagccatgga

SEQ ID NO: 1791 - RNA, 19 nt, synthetic construct
  source 1..19: mol_type = other RNA
gaattcattagccatggat

SEQ ID NO: 1792 - RNA, 19 nt, synthetic construct
  source 1..19: mol_type = other RNA
aattcattagccatggatg

SEQ ID NO: 1793 - RNA, 19 nt, synthetic construct
  source 1..19: mol_type = other RNA
attcattagccatggatgt

SEQ ID NO: 1794 - RNA, 19 nt, synthetic construct
  source 1..19: mol_type = other RNA
ttcattagccatggatgta

SEQ ID NO: 1795 - RNA, 19 nt, synthetic construct
  source 1..19: mol_type = other RNA
tcattagccatggatgtat

SEQ ID NO: 1796 - RNA, 19 nt, synthetic construct
  source 1..19: mol_type = other RNA
cattagccatggatgtatt

SEQ ID NO: 1797 - RNA, 19 nt, synthetic construct
  source 1..19: mol_type = other RNA
attagccatggatgtattc

SEQ ID NO: 1798 - RNA, 19 nt, synthetic construct
  source 1..19: mol_type = other RNA
ttagccatggatgtattca

SEQ ID NO: 1799 - RNA, 19 nt, synthetic construct
  source 1..19: mol_type = other RNA
tagccatggatgtattcat

SEQ ID NO: 1800 - RNA, 19 nt, synthetic construct
  source 1..19: mol_type = other RNA
agccatggatgtattcatg

SEQ ID NO: 1801 - RNA, 19 nt, synthetic construct
  source 1..19: mol_type = other RNA
gccatggatgtattcatga

SEQ ID NO: 1802 - RNA, 19 nt, synthetic construct
  source 1..19: mol_type = other RNA
ccatggatgtattcatgaa

SEQ ID NO: 1803 - RNA, 19 nt, synthetic construct
  source 1..19: mol_type = other RNA
catggatgtattcatgaaa

SEQ ID NO: 1804 - RNA, 19 nt, synthetic construct
  source 1..19: mol_type = other RNA
atggatgtattcatgaaag

SEQ ID NO: 1805 - RNA, 19 nt, synthetic construct
  source 1..19: mol_type = other RNA
tggatgtattcatgaaagg

SEQ ID NO: 1806 - RNA, 19 nt, synthetic construct
  source 1..19: mol_type = other RNA
ggatgtattcatgaaagga

SEQ ID NO: 1807 - RNA, 19 nt, synthetic construct
  source 1..19: mol_type = other RNA
gatgtattcatgaaaggac

SEQ ID NO: 1808 - RNA, 19 nt, synthetic construct
  source 1..19: mol_type = other RNA
atgtattcatgaaaggact

SEQ ID NO: 1809 - RNA, 19 nt, synthetic construct
  source 1..19: mol_type = other RNA
gtattcatgaaaggacttt

SEQ ID NO: 1810 - RNA, 19 nt, synthetic construct
  source 1..19: mol_type = other RNA
agaagcagcaggaaagaca

SEQ ID NO: 1811 - RNA, 19 nt, synthetic construct
  source 1..19: mol_type = other RNA
cagcaggaaagacaaaaga

SEQ ID NO: 1812 - RNA, 19 nt, synthetic construct
  source 1..19: mol_type = other RNA
gcaggaaagacaaaagagg

SEQ ID NO: 1813 - RNA, 19 nt, synthetic construct
  source 1..19: mol_type = other RNA
gaaagacaaaagagggtgt

SEQ ID NO: 1814 - RNA, 19 nt, synthetic construct
  source 1..19: mol_type = other RNA
aaagacaaaagagggtgtt

SEQ ID NO: 1815 - RNA, 19 nt, synthetic construct
  source 1..19: mol_type = other RNA
agacaaaagagggtgttct

SEQ ID NO: 1816 - RNA, 19 nt, synthetic construct
  source 1..19: mol_type = other RNA
gacaaaagagggtgttctc

SEQ ID NO: 1817 - RNA, 19 nt, synthetic construct
  source 1..19: mol_type = other RNA
agagggtgttctctatgta

SEQ ID NO: 1818 - RNA, 19 nt, synthetic construct
  source 1..19: mol_type = other RNA
agggtgttctctatgtagg

SEQ ID NO: 1819 - RNA, 19 nt, synthetic construct
  source 1..19: mol_type = other RNA
ggtgttctctatgtaggct

SEQ ID NO: 1820 - RNA, 19 nt, synthetic construct
  source 1..19: mol_type = other RNA
aggaagggtatcaagacta

SEQ ID NO: 1821 - RNA, 19 nt, synthetic construct
  source 1..19: mol_type = other RNA
aagggtatcaagactacga

SEQ ID NO: 1822 - RNA, 19 nt, synthetic construct
  source 1..19: mol_type = other RNA
agggtatcaagactacgaa

SEQ ID NO: 1823 - RNA, 19 nt, synthetic construct
  source 1..19: mol_type = other RNA
atcaagactacgaacctga

SEQ ID NO: 1824 - RNA, 19 nt, synthetic construct
  source 1..19: mol_type = other RNA
tcaagactacgaacctgaa

SEQ ID NO: 1825 - RNA, 19 nt, synthetic construct
  source 1..19: mol_type = other RNA
aagactacgaacctgaagc

SEQ ID NO: 1826 - RNA, 19 nt, synthetic construct
  source 1..19: mol_type = other RNA
gactacgaacctgaagcct

SEQ ID NO: 1827 - RNA, 19 nt, synthetic construct
  source 1..19: mol_type = other RNA
actacgaacctgaagccta

SEQ ID NO: 1828 - RNA, 19 nt, synthetic construct
  source 1..19: mol_type = other RNA
ctacgaacctgaagcctaa

SEQ ID NO: 1829 - RNA, 19 nt, synthetic construct
  source 1..19: mol_type = other RNA
acgaacctgaagcctaaga

SEQ ID NO: 1830 - RNA, 19 nt, synthetic construct
  source 1..19: mol_type = other RNA
cgaacctgaagcctaagaa

SEQ ID NO: 1831 - RNA, 19 nt, synthetic construct
  source 1..19: mol_type = other RNA
aacctgaagcctaagaaat

SEQ ID NO: 1832 - RNA, 19 nt, synthetic construct
  source 1..19: mol_type = other RNA
acctgaagcctaagaaata

SEQ ID NO: 1833 - RNA, 19 nt, synthetic construct
  source 1..19: mol_type = other RNA
cctgaagcctaagaaatat

SEQ ID NO: 1834 - RNA, 19 nt, synthetic construct
  source 1..19: mol_type = other RNA
ctgaagcctaagaaatatc

SEQ ID NO: 1835 - RNA, 19 nt, synthetic construct
  source 1..19: mol_type = other RNA
tgaagcctaagaaatatct

SEQ ID NO: 1836 - RNA, 19 nt, synthetic construct
  source 1..19: mol_type = other RNA
cctaagaaatatctttgct

SEQ ID NO: 1837 - RNA, 19 nt, synthetic construct
  source 1..19: mol_type = other RNA
ctaagaaatatctttgctc

SEQ ID NO: 1838 - RNA, 19 nt, synthetic construct
  source 1..19: mol_type = other RNA
agaaatatctttgctccca

SEQ ID NO: 1839 - RNA, 19 nt, synthetic construct
  source 1..19: mol_type = other RNA
aatatctttgctcccagtt

SEQ ID NO: 1840 - RNA, 19 nt, synthetic construct
  source 1..19: mol_type = other RNA
atatctttgctcccagttt

SEQ ID NO: 1841 - RNA, 19 nt, synthetic construct
  source 1..19: mol_type = other RNA
cagtttcttgagatctgct

SEQ ID NO: 1842 - RNA, 19 nt, synthetic construct
  source 1..19: mol_type = other RNA
tgtacaagtgctcagttcc

SEQ ID NO: 1843 - RNA, 19 nt, synthetic construct
  source 1..19: mol_type = other RNA
atgtgcccagtcatgacat

SEQ ID NO: 1844 - RNA, 19 nt, synthetic construct
  source 1..19: mol_type = other RNA
tgtgcccagtcatgacatt

SEQ ID NO: 1845 - RNA, 19 nt, synthetic construct
  source 1..19: mol_type = other RNA
gtgcccagtcatgacattt

SEQ ID NO: 1846 - RNA, 19 nt, synthetic construct
  source 1..19: mol_type = other RNA
cagtcatgacatttctcaa

SEQ ID NO: 1847 - RNA, 19 nt, synthetic construct
  source 1..19: mol_type = other RNA
agtcatgacatttctcaaa

SEQ ID NO: 1848 - RNA, 19 nt, synthetic construct
  source 1..19: mol_type = other RNA
gtcatgacatttctcaaag

SEQ ID NO: 1849 - RNA, 19 nt, synthetic construct
  source 1..19: mol_type = other RNA
tcatgacatttctcaaagt

SEQ ID NO: 1850 - RNA, 19 nt, synthetic construct
  source 1..19: mol_type = other RNA
catgacatttctcaaagtt

SEQ ID NO: 1851 - RNA, 19 nt, synthetic construct
  source 1..19: mol_type = other RNA
atgacatttctcaaagttt

SEQ ID NO: 1852 - RNA, 19 nt, synthetic construct
  source 1..19: mol_type = other RNA
tgacatttctcaaagtttt

SEQ ID NO: 1853 - RNA, 19 nt, synthetic construct
  source 1..19: mol_type = other RNA
gacatttctcaaagttttt

SEQ ID NO: 1854 - RNA, 19 nt, synthetic construct
  source 1..19: mol_type = other RNA
acatttctcaaagttttta

SEQ ID NO: 1855 - RNA, 19 nt, synthetic construct
  source 1..19: mol_type = other RNA
catttctcaaagtttttac

SEQ ID NO: 1856 - RNA, 19 nt, synthetic construct
  source 1..19: mol_type = other RNA
atttctcaaagtttttaca

SEQ ID NO: 1857 - RNA, 19 nt, synthetic construct
  source 1..19: mol_type = other RNA
tttctcaaagtttttacag

SEQ ID NO: 1858 - RNA, 19 nt, synthetic construct
  source 1..19: mol_type = other RNA
gaagtcttccatcagcagt

SEQ ID NO: 1859 - RNA, 19 nt, synthetic construct
  source 1..19: mol_type = other RNA
ttccatcagcagtgattga

SEQ ID NO: 1860 - RNA, 19 nt, synthetic construct
  source 1..19: mol_type = other RNA
tccatcagcagtgattgaa

SEQ ID NO: 1861 - RNA, 19 nt, synthetic construct
  source 1..19: mol_type = other RNA
ccatcagcagtgattgaag

SEQ ID NO: 1862 - RNA, 19 nt, synthetic construct
  source 1..19: mol_type = other RNA
catcagcagtgattgaagt

SEQ ID NO: 1863 - RNA, 19 nt, synthetic construct
  source 1..19: mol_type = other RNA
atcagcagtgattgaagta

SEQ ID NO: 1864 - RNA, 19 nt, synthetic construct
  source 1..19: mol_type = other RNA
tcagcagtgattgaagtat

SEQ ID NO: 1865 - RNA, 19 nt, synthetic construct
  source 1..19: mol_type = other RNA
cagcagtgattgaagtatc

SEQ ID NO: 1866 - RNA, 19 nt, synthetic construct
  source 1..19: mol_type = other RNA
agcagtgattgaagtatct

SEQ ID NO: 1867 - RNA, 19 nt, synthetic construct
  source 1..19: mol_type = other RNA
gcagtgattgaagtatctg

SEQ ID NO: 1868 - RNA, 19 nt, synthetic construct
  source 1..19: mol_type = other RNA
cagtgattgaagtatctgt

SEQ ID NO: 1869 - RNA, 19 nt, synthetic construct
  source 1..19: mol_type = other RNA
agtgattgaagtatctgta

SEQ ID NO: 1870 - RNA, 19 nt, synthetic construct
  source 1..19: mol_type = other RNA
attgaagtatctgtacctg

SEQ ID NO: 1871 - RNA, 19 nt, synthetic construct
  source 1..19: mol_type = other RNA
catttcggtgcttcccttt

SEQ ID NO: 1872 - RNA, 19 nt, synthetic construct
  source 1..19: mol_type = other RNA
cggtgcttccctttcactg

SEQ ID NO: 1873 - RNA, 19 nt, synthetic construct
  source 1..19: mol_type = other RNA
ggtgcttccctttcactga

SEQ ID NO: 1874 - RNA, 19 nt, synthetic construct
  source 1..19: mol_type = other RNA
gtgcttccctttcactgaa

SEQ ID NO: 1875 - RNA, 19 nt, synthetic construct
  source 1..19: mol_type = other RNA
tgcttccctttcactgaag

SEQ ID NO: 1876 - RNA, 19 nt, synthetic construct
  source 1..19: mol_type = other RNA
gcttccctttcactgaagt

SEQ ID NO: 1877 - RNA, 19 nt, synthetic construct
  source 1..19: mol_type = other RNA
cttccctttcactgaagtg

SEQ ID NO: 1878 - RNA, 19 nt, synthetic construct
  source 1..19: mol_type = other RNA
ttccctttcactgaagtga

SEQ ID NO: 1879 - RNA, 19 nt, synthetic construct
  source 1..19: mol_type = other RNA
tccctttcactgaagtgaa

SEQ ID NO: 1880 - RNA, 19 nt, synthetic construct
  source 1..19: mol_type = other RNA
ccctttcactgaagtgaat

SEQ ID NO: 1881 - RNA, 19 nt, synthetic construct
  source 1..19: mol_type = other RNA
cctttcactgaagtgaata

SEQ ID NO: 1882 - RNA, 19 nt, synthetic construct
  source 1..19: mol_type = other RNA
ctttcactgaagtgaatac

SEQ ID NO: 1883 - RNA, 19 nt, synthetic construct
  source 1..19: mol_type = other RNA
tttcactgaagtgaataca

SEQ ID NO: 1884 - RNA, 19 nt, synthetic construct
  source 1..19: mol_type = other RNA
ttcactgaagtgaatacat

SEQ ID NO: 1885 - RNA, 19 nt, synthetic construct
  source 1..19: mol_type = other RNA
tcactgaagtgaatacatg

SEQ ID NO: 1886 - RNA, 19 nt, synthetic construct
  source 1..19: mol_type = other RNA
cactgaagtgaatacatgg

SEQ ID NO: 1887 - RNA, 19 nt, synthetic construct
  source 1..19: mol_type = other RNA
actgaagtgaatacatggt

SEQ ID NO: 1888 - RNA, 19 nt, synthetic construct
  source 1..19: mol_type = other RNA
ctgaagtgaatacatggta

SEQ ID NO: 1889 - RNA, 19 nt, synthetic construct
  source 1..19: mol_type = other RNA
tgaagtgaatacatggtag

SEQ ID NO: 1890 - RNA, 19 nt, synthetic construct
  source 1..19: mol_type = other RNA
aagtgaatacatggtagca

SEQ ID NO: 1891 - RNA, 19 nt, synthetic construct
  source 1..19: mol_type = other RNA
agtgaatacatggtagcag

SEQ ID NO: 1892 - RNA, 19 nt, synthetic construct
  source 1..19: mol_type = other RNA
gtgaatacatggtagcagg

SEQ ID NO: 1893 - RNA, 19 nt, synthetic construct
  source 1..19: mol_type = other RNA
gaatacatggtagcagggt

SEQ ID NO: 1894 - RNA, 19 nt, synthetic construct
  source 1..19: mol_type = other RNA
aatacatggtagcagggtc

SEQ ID NO: 1895 - RNA, 19 nt, synthetic construct
  source 1..19: mol_type = other RNA
ggtagcagggtctttgtgt

SEQ ID NO: 1896 - RNA, 19 nt, synthetic construct
  source 1..19: mol_type = other RNA
agggtctttgtgtgctgtg

SEQ ID NO: 1897 - RNA, 19 nt, synthetic construct
  source 1..19: mol_type = other RNA
ggtctttgtgtgctgtgga

SEQ ID NO: 1898 - RNA, 19 nt, synthetic construct
  source 1..19: mol_type = other RNA
tgtgtgctgtggattttgt

SEQ ID NO: 1899 - RNA, 19 nt, synthetic construct
  source 1..19: mol_type = other RNA
gtgtgctgtggattttgtg

SEQ ID NO: 1900 - RNA, 19 nt, synthetic construct
  source 1..19: mol_type = other RNA
tgtgctgtggattttgtgg

SEQ ID NO: 1901 - RNA, 19 nt, synthetic construct
  source 1..19: mol_type = other RNA
gtgctgtggattttgtggc

SEQ ID NO: 1902 - RNA, 19 nt, synthetic construct
  source 1..19: mol_type = other RNA
tgctgtggattttgtggct

SEQ ID NO: 1903 - RNA, 19 nt, synthetic construct
  source 1..19: mol_type = other RNA
gctgtggattttgtggctt

SEQ ID NO: 1904 - RNA, 19 nt, synthetic construct
  source 1..19: mol_type = other RNA
ctgtggattttgtggcttc

SEQ ID NO: 1905 - RNA, 19 nt, synthetic construct
  source 1..19: mol_type = other RNA
gtggattttgtggcttcaa

SEQ ID NO: 1906 - RNA, 19 nt, synthetic construct
  source 1..19: mol_type = other RNA
tggattttgtggcttcaat

SEQ ID NO: 1907 - RNA, 19 nt, synthetic construct
  source 1..19: mol_type = other RNA
gattttgtggcttcaatct

SEQ ID NO: 1908 - RNA, 19 nt, synthetic construct
  source 1..19: mol_type = other RNA
attttgtggcttcaatcta

SEQ ID NO: 1909 - RNA, 19 nt, synthetic construct
  source 1..19: mol_type = other RNA
ccacttatttctaaatcct

SEQ ID NO: 1910 - RNA, 19 nt, synthetic construct
  source 1..19: mol_type = other RNA
cacttatttctaaatcctc

SEQ ID NO: 1911 - RNA, 19 nt, synthetic construct
  source 1..19: mol_type = other RNA
acttatttctaaatcctca

SEQ ID NO: 1912 - RNA, 19 nt, synthetic construct
  source 1..19: mol_type = other RNA
cttatttctaaatcctcac

SEQ ID NO: 1913 - RNA, 19 nt, synthetic construct
  source 1..19: mol_type = other RNA
tatttctaaatcctcacta

SEQ ID NO: 1914 - RNA, 19 nt, synthetic construct
  source 1..19: mol_type = other RNA
atttctaaatcctcactat

SEQ ID NO: 1915 - RNA, 19 nt, synthetic construct
  source 1..19: mol_type = other RNA
tttctaaatcctcactatt

SEQ ID NO: 1916 - RNA, 19 nt, synthetic construct
  source 1..19: mol_type = other RNA
ttctaaatcctcactattt

SEQ ID NO: 1917 - RNA, 19 nt, synthetic construct
  source 1..19: mol_type = other RNA
tctaaatcctcactatttt

SEQ ID NO: 1918 - RNA, 19 nt, synthetic construct
  source 1..19: mol_type = other RNA
ctaaatcctcactattttt

SEQ ID NO: 1919 - RNA, 19 nt, synthetic construct
  source 1..19: mol_type = other RNA
taaatcctcactatttttt

SEQ ID NO: 1920 - RNA, 19 nt, synthetic construct
  source 1..19: mol_type = other RNA
aaatcctcactattttttt

SEQ ID NO: 1921 - RNA, 19 nt, synthetic construct
  source 1..19: mol_type = other RNA
aatcctcactatttttttg

SEQ ID NO: 1922 - RNA, 19 nt, synthetic construct
  source 1..19: mol_type = other RNA
atcctcactatttttttgt

SEQ ID NO: 1923 - RNA, 19 nt, synthetic construct
  source 1..19: mol_type = other RNA
tcctcactatttttttgtt

SEQ ID NO: 1924 - RNA, 19 nt, synthetic construct
  source 1..19: mol_type = other RNA
cctcactatttttttgttg

SEQ ID NO: 1925 - RNA, 19 nt, synthetic construct
  source 1..19: mol_type = other RNA
ctcactatttttttgttgc

SEQ ID NO: 1926 - RNA, 19 nt, synthetic construct
  source 1..19: mol_type = other RNA
tcactatttttttgttgct

SEQ ID NO: 1927 - RNA, 19 nt, synthetic construct
  source 1..19: mol_type = other RNA
cactatttttttgttgctg

SEQ ID NO: 1928 - RNA, 19 nt, synthetic construct
  source 1..19: mol_type = other RNA
actatttttttgttgctgt

SEQ ID NO: 1929 - RNA, 19 nt, synthetic construct
  source 1..19: mol_type = other RNA
ctatttttttgttgctgtt

SEQ ID NO: 1930 - RNA, 19 nt, synthetic construct
  source 1..19: mol_type = other RNA
tatttttttgttgctgttg

SEQ ID NO: 1931 - RNA, 19 nt, synthetic construct
  source 1..19: mol_type = other RNA
atttttttgttgctgttgt

SEQ ID NO: 1932 - RNA, 19 nt, synthetic construct
  source 1..19: mol_type = other RNA
tttttttgttgctgttgtt

SEQ ID NO: 1933 - RNA, 19 nt, synthetic construct
  source 1..19: mol_type = other RNA
ttttttgttgctgttgttc

SEQ ID NO: 1934 - RNA, 19 nt, synthetic construct
  source 1..19: mol_type = other RNA
tttttgttgctgttgttca

SEQ ID NO: 1935 - RNA, 19 nt, synthetic construct
  source 1..19: mol_type = other RNA
ttttgttgctgttgttcag

SEQ ID NO: 1936 - RNA, 19 nt, synthetic construct
  source 1..19: mol_type = other RNA
tttgttgctgttgttcaga

SEQ ID NO: 1937 - RNA, 19 nt, synthetic construct
  source 1..19: mol_type = other RNA
ttgttgctgttgttcagaa

SEQ ID NO: 1938 - RNA, 19 nt, synthetic construct
  source 1..19: mol_type = other RNA
tgttgctgttgttcagaag

SEQ ID NO: 1939 - RNA, 19 nt, synthetic construct
  source 1..19: mol_type = other RNA
gttgctgttgttcagaagt

SEQ ID NO: 1940 - RNA, 19 nt, synthetic construct
  source 1..19: mol_type = other RNA
ttgctgttgttcagaagtt

SEQ ID NO: 1941 - RNA, 19 nt, synthetic construct
  source 1..19: mol_type = other RNA
tgctgttgttcagaagttg

SEQ ID NO: 1942 - RNA, 19 nt, synthetic construct
  source 1..19: mol_type = other RNA
gctgttgttcagaagttgt

SEQ ID NO: 1943 - RNA, 19 nt, synthetic construct
  source 1..19: mol_type = other RNA
ctgttgttcagaagttgtt

SEQ ID NO: 1944 - RNA, 19 nt, synthetic construct
  source 1..19: mol_type = other RNA
tgttgttcagaagttgtta

SEQ ID NO: 1945 - RNA, 19 nt, synthetic construct
  source 1..19: mol_type = other RNA
gttgttcagaagttgttag

SEQ ID NO: 1946 - RNA, 19 nt, synthetic construct
  source 1..19: mol_type = other RNA
ttgttcagaagttgttagt

SEQ ID NO: 1947 - RNA, 19 nt, synthetic construct
  source 1..19: mol_type = other RNA
tgttcagaagttgttagtg

SEQ ID NO: 1948 - RNA, 19 nt, synthetic construct
  source 1..19: mol_type = other RNA
gttcagaagttgttagtga

SEQ ID NO: 1949 - RNA, 19 nt, synthetic construct
  source 1..19: mol_type = other RNA
ttcagaagttgttagtgat

SEQ ID NO: 1950 - RNA, 19 nt, synthetic construct
  source 1..19: mol_type = other RNA
tcagaagttgttagtgatt

SEQ ID NO: 1951 - RNA, 19 nt, synthetic construct
  source 1..19: mol_type = other RNA
cagaagttgttagtgattt

SEQ ID NO: 1952 - RNA, 19 nt, synthetic construct
  source 1..19: mol_type = other RNA
agaagttgttagtgatttg

SEQ ID NO: 1953 - RNA, 19 nt, synthetic construct
  source 1..19: mol_type = other RNA
gaagttgttagtgatttgc

SEQ ID NO: 1954 - RNA, 19 nt, synthetic construct
  source 1..19: mol_type = other RNA
aagttgttagtgatttgct

SEQ ID NO: 1955 - RNA, 19 nt, synthetic construct
  source 1..19: mol_type = other RNA
agttgttagtgatttgcta

SEQ ID NO: 1956 - RNA, 19 nt, synthetic construct
  source 1..19: mol_type = other RNA
gttgttagtgatttgctat

SEQ ID NO: 1957 - RNA, 19 nt, synthetic construct
  source 1..19: mol_type = other RNA
ttgttagtgatttgctatc

SEQ ID NO: 1958 - RNA, 19 nt, synthetic construct
  source 1..19: mol_type = other RNA
attataagatttttaggtg

SEQ ID NO: 1959 - RNA, 19 nt, synthetic construct
  source 1..19: mol_type = other RNA
ttataagatttttaggtgt

SEQ ID NO: 1960 - RNA, 19 nt, synthetic construct
  source 1..19: mol_type = other RNA
tataagatttttaggtgtc

SEQ ID NO: 1961 - RNA, 19 nt, synthetic construct
  source 1..19: mol_type = other RNA
ataagatttttaggtgtct

SEQ ID NO: 1962 - RNA, 19 nt, synthetic construct
  source 1..19: mol_type = other RNA
taagatttttaggtgtctt

SEQ ID NO: 1963 - RNA, 19 nt, synthetic construct
  source 1..19: mol_type = other RNA
aagatttttaggtgtcttt

SEQ ID NO: 1964 - RNA, 19 nt, synthetic construct
  source 1..19: mol_type = other RNA
agatttttaggtgtctttt

SEQ ID NO: 1965 - RNA, 19 nt, synthetic construct
  source 1..19: mol_type = other RNA
gatttttaggtgtctttta

SEQ ID NO: 1966 - RNA, 19 nt, synthetic construct
  source 1..19: mol_type = other RNA
atttttaggtgtcttttaa

SEQ ID NO: 1967 - RNA, 19 nt, synthetic construct
  source 1..19: mol_type = other RNA
tttttaggtgtcttttaat

SEQ ID NO: 1968 - RNA, 19 nt, synthetic construct
  source 1..19: mol_type = other RNA
ttttaggtgtcttttaatg

SEQ ID NO: 1969 - RNA, 19 nt, synthetic construct
  source 1..19: mol_type = other RNA
tttaggtgtcttttaatga

SEQ ID NO: 1970 - RNA, 19 nt, synthetic construct
  source 1..19: mol_type = other RNA
ttaggtgtcttttaatgat

SEQ ID NO: 1971 - RNA, 19 nt, synthetic construct
  source 1..19: mol_type = other RNA
taggtgtcttttaatgata

SEQ ID NO: 1972 - RNA, 19 nt, synthetic construct
  source 1..19: mol_type = other RNA
aggtgtcttttaatgatac

SEQ ID NO: 1973 - RNA, 19 nt, synthetic construct
  source 1..19: mol_type = other RNA
ggtgtcttttaatgatact

SEQ ID NO: 1974 - RNA, 19 nt, synthetic construct
  source 1..19: mol_type = other RNA
gtgtcttttaatgatactg

SEQ ID NO: 1975 - RNA, 19 nt, synthetic construct
  source 1..19: mol_type = other RNA
tgtcttttaatgatactgt

SEQ ID NO: 1976 - RNA, 19 nt, synthetic construct
  source 1..19: mol_type = other RNA
gtcttttaatgatactgtc

SEQ ID NO: 1977 - RNA, 19 nt, synthetic construct
  source 1..19: mol_type = other RNA
tcttttaatgatactgtct

SEQ ID NO: 1978 - RNA, 19 nt, synthetic construct
  source 1..19: mol_type = other RNA
cttttaatgatactgtcta

SEQ ID NO: 1979 - RNA, 19 nt, synthetic construct
  source 1..19: mol_type = other RNA
ttttaatgatactgtctaa

SEQ ID NO: 1980 - RNA, 19 nt, synthetic construct
  source 1..19: mol_type = other RNA
tttaatgatactgtctaag

SEQ ID NO: 1981 - RNA, 19 nt, synthetic construct
  source 1..19: mol_type = other RNA
ttaatgatactgtctaaga

SEQ ID NO: 1982 - RNA, 19 nt, synthetic construct
  source 1..19: mol_type = other RNA
taatgatactgtctaagaa

SEQ ID NO: 1983 - RNA, 19 nt, synthetic construct
  source 1..19: mol_type = other RNA
aatgatactgtctaagaat

SEQ ID NO: 1984 - RNA, 19 nt, synthetic construct
  source 1..19: mol_type = other RNA
atgatactgtctaagaata

SEQ ID NO: 1985 - RNA, 19 nt, synthetic construct
  source 1..19: mol_type = other RNA
tgatactgtctaagaataa

SEQ ID NO: 1986 - RNA, 19 nt, synthetic construct
  source 1..19: mol_type = other RNA
gatactgtctaagaataat

SEQ ID NO: 1987 - RNA, 19 nt, synthetic construct
  source 1..19: mol_type = other RNA
atactgtctaagaataatg

SEQ ID NO: 1988 - RNA, 19 nt, synthetic construct
  source 1..19: mol_type = other RNA
tactgtctaagaataatga

SEQ ID NO: 1989 - RNA, 19 nt, synthetic construct
  source 1..19: mol_type = other RNA
gtattgtgaaatttgttaa

SEQ ID NO: 1990 - RNA, 19 nt, synthetic construct
  source 1..19: mol_type = other RNA
tattgtgaaatttgttaat

SEQ ID NO: 1991 - RNA, 19 nt, synthetic construct
  source 1..19: mol_type = other RNA
attgtgaaatttgttaata

SEQ ID NO: 1992 - RNA, 19 nt, synthetic construct
  source 1..19: mol_type = other RNA
aaatttgttaatatatata

SEQ ID NO: 1993 - RNA, 19 nt, synthetic construct
  source 1..19: mol_type = other RNA
aatttgttaatatatataa

SEQ ID NO: 1994 - RNA, 19 nt, synthetic construct
  source 1..19: mol_type = other RNA
atttgttaatatatataat

SEQ ID NO: 1995 - RNA, 19 nt, synthetic construct
  source 1..19: mol_type = other RNA
tttgttaatatatataata

SEQ ID NO: 1996 - RNA, 19 nt, synthetic construct
  source 1..19: mol_type = other RNA
ttgttaatatatataatac

SEQ ID NO: 1997 - RNA, 19 nt, synthetic construct
  source 1..19: mol_type = other RNA
tgttaatatatataatact

SEQ ID NO: 1998 - RNA, 19 nt, synthetic construct
  source 1..19: mol_type = other RNA
gttaatatatataatactt

SEQ ID NO: 1999 - RNA, 19 nt, synthetic construct
  source 1..19: mol_type = other RNA
ttaatatatataatactta

SEQ ID NO: 2000 - RNA, 19 nt, synthetic construct
  source 1..19: mol_type = other RNA
tatgtgagcatgaaactat

SEQ ID NO: 2001 - RNA, 19 nt, synthetic construct
  source 1..19: mol_type = other RNA
atgtgagcatgaaactatg

SEQ ID NO: 2002 - RNA, 19 nt, synthetic construct
  source 1..19: mol_type = other RNA
gtgagcatgaaactatgca

SEQ ID NO: 2003 - RNA, 19 nt, synthetic construct
  source 1..19: mol_type = other RNA
tgagcatgaaactatgcac

SEQ ID NO: 2004 - RNA, 19 nt, synthetic construct
  source 1..19: mol_type = other RNA
gagcatgaaactatgcacc

SEQ ID NO: 2005 - RNA, 19 nt, synthetic construct
  source 1..19: mol_type = other RNA
agcatgaaactatgcacct

SEQ ID NO: 2006 - RNA, 19 nt, synthetic construct
  source 1..19: mol_type = other RNA
gcatgaaactatgcaccta

SEQ ID NO: 2007 - RNA, 19 nt, synthetic construct
  source 1..19: mol_type = other RNA
catgaaactatgcacctat

SEQ ID NO: 2008 - RNA, 19 nt, synthetic construct
  source 1..19: mol_type = other RNA
atgaaactatgcacctata

SEQ ID NO: 2009 - RNA, 19 nt, synthetic construct
  source 1..19: mol_type = other RNA
tgaaactatgcacctataa

SEQ ID NO: 2010 - RNA, 19 nt, synthetic construct
  source 1..19: mol_type = other RNA
gaaactatgcacctataaa

SEQ ID NO: 2011 - RNA, 19 nt, synthetic construct
  source 1..19: mol_type = other RNA
aaactatgcacctataaat

SEQ ID NO: 2012 - RNA, 19 nt, synthetic construct
  source 1..19: mol_type = other RNA
aactatgcacctataaata

SEQ ID NO: 2013 - RNA, 19 nt, synthetic construct
  source 1..19: mol_type = other RNA
actatgcacctataaatac

SEQ ID NO: 2014 - RNA, 19 nt, synthetic construct
  source 1..19: mol_type = other RNA
ctatgcacctataaatact

SEQ ID NO: 2015 - RNA, 19 nt, synthetic construct
  source 1..19: mol_type = other RNA
tatgcacctataaatacta

SEQ ID NO: 2016 - RNA, 19 nt, synthetic construct
  source 1..19: mol_type = other RNA
atgcacctataaatactaa

SEQ ID NO: 2017 - RNA, 19 nt, synthetic construct
  source 1..19: mol_type = other RNA
gtttgtatataaatggtga

SEQ ID NO: 2018 - RNA, 19 nt, synthetic construct
  source 1..19: mol_type = other RNA
tttgtatataaatggtgag

SEQ ID NO: 2019 - RNA, 19 nt, synthetic construct
  source 1..19: mol_type = other RNA
ttgtatataaatggtgaga

SEQ ID NO: 2020 - RNA, 19 nt, synthetic construct
  source 1..19: mol_type = other RNA
tgtatataaatggtgagaa

SEQ ID NO: 2021 - RNA, 19 nt, synthetic construct
  source 1..19: mol_type = other RNA
gtatataaatggtgagaat

SEQ ID NO: 2022 - RNA, 19 nt, synthetic construct
  source 1..19: mol_type = other RNA
tatataaatggtgagaatt

SEQ ID NO: 2023 - RNA, 19 nt, synthetic construct
  source 1..19: mol_type = other RNA
atataaatggtgagaatta

SEQ ID NO: 2024 - RNA, 19 nt, synthetic construct
  source 1..19: mol_type = other RNA
tataaatggtgagaattaa

SEQ ID NO: 2025 - RNA, 19 nt, synthetic construct
  source 1..19: mol_type = other RNA
ataaatggtgagaattaaa

SEQ ID NO: 2026 - RNA, 19 nt, synthetic construct
  source 1..19: mol_type = other RNA
taaatggtgagaattaaaa

SEQ ID NO: 2027 - RNA, 19 nt, synthetic construct
  source 1..19: mol_type = other RNA
aaatggtgagaattaaaat

SEQ ID NO: 2028 - RNA, 19 nt, synthetic construct
  source 1..19: mol_type = other RNA
aatggtgagaattaaaata

SEQ ID NO: 2029 - RNA, 19 nt, synthetic construct
  source 1..19: mol_type = other RNA
atggtgagaattaaaataa

SEQ ID NO: 2030 - RNA, 19 nt, synthetic construct
  source 1..19: mol_type = other RNA
tggtgagaattaaaataaa

SEQ ID NO: 2031 - RNA, 19 nt, synthetic construct
  source 1..19: mol_type = other RNA
ggtgagaattaaaataaaa

SEQ ID NO: 2032 - RNA, 19 nt, synthetic construct
  source 1..19: mol_type = other RNA
ttatttttatcccatctca

SEQ ID NO: 2033 - RNA, 19 nt, synthetic construct
  source 1..19: mol_type = other RNA
atttttatcccatctcact

SEQ ID NO: 2034 - RNA, 19 nt, synthetic construct
  source 1..19: mol_type = other RNA
tttttatcccatctcactt

SEQ ID NO: 2035 - RNA, 19 nt, synthetic construct
  source 1..19: mol_type = other RNA
ttttatcccatctcacttt

SEQ ID NO: 2036 - RNA, 19 nt, synthetic construct
  source 1..19: mol_type = other RNA
tttatcccatctcacttta

SEQ ID NO: 2037 - RNA, 19 nt, synthetic construct
  source 1..19: mol_type = other RNA
ttatcccatctcactttaa

SEQ ID NO: 2038 - RNA, 19 nt, synthetic construct
  source 1..19: mol_type = other RNA
tatcccatctcactttaat

SEQ ID NO: 2039 - RNA, 19 nt, synthetic construct
  source 1..19: mol_type = other RNA
atcccatctcactttaata

SEQ ID NO: 2040 - RNA, 19 nt, synthetic construct
  source 1..19: mol_type = other RNA
tcccatctcactttaataa

SEQ ID NO: 2041 - RNA, 19 nt, synthetic construct
  source 1..19: mol_type = other RNA
cccatctcactttaataat

SEQ ID NO: 2042 - RNA, 19 nt, synthetic construct
  source 1..19: mol_type = other RNA
ccatctcactttaataata

SEQ ID NO: 2043 - RNA, 19 nt, synthetic construct
  source 1..19: mol_type = other RNA
catctcactttaataataa

SEQ ID NO: 2044 - RNA, 19 nt, synthetic construct
  source 1..19: mol_type = other RNA
atctcactttaataataaa

SEQ ID NO: 2045 - RNA, 19 nt, synthetic construct
  source 1..19: mol_type = other RNA
tctcactttaataataaaa

SEQ ID NO: 2046 - RNA, 19 nt, synthetic construct
  source 1..19: mol_type = other RNA
ctcactttaataataaaaa

SEQ ID NO: 2047 - RNA, 19 nt, synthetic construct
  source 1..19: mol_type = other RNA
tcactttaataataaaaat

SEQ ID NO: 2048 - RNA, 19 nt, synthetic construct
  source 1..19: mol_type = other RNA
cactttaataataaaaatc

SEQ ID NO: 2049 - RNA, 19 nt, synthetic construct
  source 1..19: mol_type = other RNA
atttgaagaaggaggaatt

SEQ ID NO: 2050 - RNA, 19 nt, synthetic construct
  source 1..19: mol_type = other RNA
gaattttagaagaggtaga

SEQ ID NO: 2051 - RNA, 19 nt, synthetic construct
  source 1..19: mol_type = other RNA
agaagaggtagagaaaatg

SEQ ID NO: 2052 - RNA, 19 nt, synthetic construct
  source 1..19: mol_type = other RNA
gaagaggtagagaaaatgg

SEQ ID NO: 2053 - RNA, 19 nt, synthetic construct
  source 1..19: mol_type = other RNA
aagaggtagagaaaatgga

SEQ ID NO: 2054 - RNA, 19 nt, synthetic construct
  source 1..19: mol_type = other RNA
agaggtagagaaaatggaa

SEQ ID NO: 2055 - RNA, 19 nt, synthetic construct
  source 1..19: mol_type = other RNA
gaggtagagaaaatggaac

SEQ ID NO: 2056 - RNA, 19 nt, synthetic construct
  source 1..19: mol_type = other RNA
aggtagagaaaatggaaca

SEQ ID NO: 2057 - RNA, 19 nt, synthetic construct
  source 1..19: mol_type = other RNA
gtagagaaaatggaacatt

SEQ ID NO: 2058 - RNA, 19 nt, synthetic construct
  source 1..19: mol_type = other RNA
tagagaaaatggaacatta

SEQ ID NO: 2059 - RNA, 19 nt, synthetic construct
  source 1..19: mol_type = other RNA
agagaaaatggaacattaa

SEQ ID NO: 2060 - RNA, 19 nt, synthetic construct
  source 1..19: mol_type = other RNA
gagaaaatggaacattaac

SEQ ID NO: 2061 - RNA, 19 nt, synthetic construct
  source 1..19: mol_type = other RNA
agaaaatggaacattaacc

SEQ ID NO: 2062 - RNA, 19 nt, synthetic construct
  source 1..19: mol_type = other RNA
gaaaatggaacattaaccc

SEQ ID NO: 2063 - RNA, 19 nt, synthetic construct
  source 1..19: mol_type = other RNA
aaaatggaacattaaccct

SEQ ID NO: 2064 - RNA, 19 nt, synthetic construct
  source 1..19: mol_type = other RNA
atggaacattaaccctaca

SEQ ID NO: 2065 - RNA, 19 nt, synthetic construct
  source 1..19: mol_type = other RNA
actgccagaagtgtgtttt

SEQ ID NO: 2066 - RNA, 19 nt, synthetic construct
  source 1..19: mol_type = other RNA
ctgccagaagtgtgttttg

SEQ ID NO: 2067 - RNA, 19 nt, synthetic construct
  source 1..19: mol_type = other RNA
ttgaaagtcctttcatgaa

SEQ ID NO: 2068 - RNA, 19 nt, synthetic construct
  source 1..19: mol_type = other RNA
tttgaaagtcctttcatga

SEQ ID NO: 2069 - RNA, 19 nt, synthetic construct
  source 1..19: mol_type = other RNA
ctttgaaagtcctttcatg

SEQ ID NO: 2070 - RNA, 19 nt, synthetic construct
  source 1..19: mol_type = other RNA
cctttgaaagtcctttcat

SEQ ID NO: 2071 - RNA, 19 nt, synthetic construct
  source 1..19: mol_type = other RNA
gcctttgaaagtcctttca

SEQ ID NO: 2072 - RNA, 19 nt, synthetic construct
  source 1..19: mol_type = other RNA
ggcctttgaaagtcctttc

SEQ ID NO: 2073 - RNA, 19 nt, synthetic construct
  source 1..19: mol_type = other RNA
agcagccacaactccctcc

SEQ ID NO: 2074 - RNA, 19 nt, synthetic construct
  source 1..19: mol_type = other RNA
agcagcagccacaactccc

SEQ ID NO: 2075 - RNA, 19 nt, synthetic construct
  source 1..19: mol_type = other RNA
cagcagcagccacaactcc

SEQ ID NO: 2076 - RNA, 19 nt, synthetic construct
  source 1..19: mol_type = other RNA
tcagcagcagccacaactc

SEQ ID NO: 2077 - RNA, 19 nt, synthetic construct
  source 1..19: mol_type = other RNA
tctcagcagcagccacaac

SEQ ID NO: 2078 - RNA, 19 nt, synthetic construct
  source 1..19: mol_type = other RNA
ttctcagcagcagccacaa

SEQ ID NO: 2079 - RNA, 19 nt, synthetic construct
  source 1..19: mol_type = other RNA
tttctcagcagcagccaca

SEQ ID NO: 2080 - RNA, 19 nt, synthetic construct
  source 1..19: mol_type = other RNA
ttttctcagcagcagccac

SEQ ID NO: 2081 - RNA, 19 nt, synthetic construct
  source 1..19: mol_type = other RNA
gttttctcagcagcagcca

SEQ ID NO: 2082 - RNA, 19 nt, synthetic construct
  source 1..19: mol_type = other RNA
ggttttctcagcagcagcc

SEQ ID NO: 2083 - RNA, 19 nt, synthetic construct
  source 1..19: mol_type = other RNA
gtcttctcagccactgttg

SEQ ID NO: 2084 - RNA, 19 nt, synthetic construct
  source 1..19: mol_type = other RNA
ggtcttctcagccactgtt

SEQ ID NO: 2085 - RNA, 19 nt, synthetic construct
  source 1..19: mol_type = other RNA
tggtcttctcagccactgt

SEQ ID NO: 2086 - RNA, 19 nt, synthetic construct
  source 1..19: mol_type = other RNA
ttggtcttctcagccactg

SEQ ID NO: 2087 - RNA, 19 nt, synthetic construct
  source 1..19: mol_type = other RNA
tttggtcttctcagccact

SEQ ID NO: 2088 - RNA, 19 nt, synthetic construct
  source 1..19: mol_type = other RNA
ctttggtcttctcagccac

SEQ ID NO: 2089 - RNA, 19 nt, synthetic construct
  source 1..19: mol_type = other RNA
tctttggtcttctcagcca

SEQ ID NO: 2090 - RNA, 19 nt, synthetic construct
  source 1..19: mol_type = other RNA
ctctttggtcttctcagcc

SEQ ID NO: 2091 - RNA, 19 nt, synthetic construct
  source 1..19: mol_type = other RNA
gctctttggtcttctcagc

SEQ ID NO: 2092 - RNA, 19 nt, synthetic construct
  source 1..19: mol_type = other RNA
tgctctttggtcttctcag

SEQ ID NO: 2093 - RNA, 19 nt, synthetic construct
  source 1..19: mol_type = other RNA
ttgctctttggtcttctca

SEQ ID NO: 2094 - RNA, 19 nt, synthetic construct
  source 1..19: mol_type = other RNA
cttgctctttggtcttctc

SEQ ID NO: 2095 - RNA, 19 nt, synthetic construct
  source 1..19: mol_type = other RNA
acttgctctttggtcttct

SEQ ID NO: 2096 - RNA, 19 nt, synthetic construct
  source 1..19: mol_type = other RNA
cacttgctctttggtcttc

SEQ ID NO: 2097 - RNA, 19 nt, synthetic construct
  source 1..19: mol_type = other RNA
tcacttgctctttggtctt

SEQ ID NO: 2098 - RNA, 19 nt, synthetic construct
  source 1..19: mol_type = other RNA
gtcacttgctctttggtct

SEQ ID NO: 2099 - RNA, 19 nt, synthetic construct
  source 1..19: mol_type = other RNA
tgtcacttgctctttggtc

SEQ ID NO: 2100 - RNA, 19 nt, synthetic construct
  source 1..19: mol_type = other RNA
ttgtcacttgctctttggt

SEQ ID NO: 2101 - RNA, 19 nt, synthetic construct
  source 1..19: mol_type = other RNA
tttgtcacttgctctttgg

SEQ ID NO: 2102 - RNA, 19 nt, synthetic construct
  source 1..19: mol_type = other RNA
atttgtcacttgctctttg

SEQ ID NO: 2103 - RNA, 19 nt, synthetic construct
  source 1..19: mol_type = other RNA
catttgtcacttgctcttt

SEQ ID NO: 2104 - RNA, 19 nt, synthetic construct
  source 1..19: mol_type = other RNA
acatttgtcacttgctctt

SEQ ID NO: 2105 - RNA, 19 nt, synthetic construct
  source 1..19: mol_type = other RNA
aacatttgtcacttgctct

SEQ ID NO: 2106 - RNA, 19 nt, synthetic construct
  source 1..19: mol_type = other RNA
caacatttgtcacttgctc

SEQ ID NO: 2107 - RNA, 19 nt, synthetic construct
  source 1..19: mol_type = other RNA
ccaacatttgtcacttgct

SEQ ID NO: 2108 - RNA, 19 nt, synthetic construct
  source 1..19: mol_type = other RNA
tccaacatttgtcacttgc

SEQ ID NO: 2109 - RNA, 19 nt, synthetic construct
  source 1..19: mol_type = other RNA
ctccaacatttgtcacttg

SEQ ID NO: 2110 - RNA, 19 nt, synthetic construct
  source 1..19: mol_type = other RNA
cctccaacatttgtcactt

SEQ ID NO: 2111 - RNA, 19 nt, synthetic construct
  source 1..19: mol_type = other RNA
tcctccaacatttgtcact

SEQ ID NO: 2112 - RNA, 19 nt, synthetic construct
  source 1..19: mol_type = other RNA
ctcctccaacatttgtcac

SEQ ID NO: 2113 - RNA, 19 nt, synthetic construct
  source 1..19: mol_type = other RNA
gctcctccaacatttgtca

SEQ ID NO: 2114 - RNA, 19 nt, synthetic construct
  source 1..19: mol_type = other RNA
tggaactgagcacttgtac

SEQ ID NO: 2115 - RNA, 19 nt, synthetic construct
  source 1..19: mol_type = other RNA
ttggaactgagcacttgta

SEQ ID NO: 2116 - RNA, 19 nt, synthetic construct
  source 1..19: mol_type = other RNA
attggaactgagcacttgt

SEQ ID NO: 2117 - RNA, 19 nt, synthetic construct
  source 1..19: mol_type = other RNA
cattggaactgagcacttg

SEQ ID NO: 2118 - RNA, 19 nt, synthetic construct
  source 1..19: mol_type = other RNA
acattggaactgagcactt

SEQ ID NO: 2119 - RNA, 19 nt, synthetic construct
  source 1..19: mol_type = other RNA
cacattggaactgagcact

SEQ ID NO: 2120 - RNA, 19 nt, synthetic construct
  source 1..19: mol_type = other RNA
gcacattggaactgagcac

SEQ ID NO: 2121 - RNA, 19 nt, synthetic construct
  source 1..19: mol_type = other RNA
ggcacattggaactgagca

SEQ ID NO: 2122 - RNA, 19 nt, synthetic construct
  source 1..19: mol_type = other RNA
gggcacattggaactgagc

SEQ ID NO: 2123 - RNA, 19 nt, synthetic construct
  source 1..19: mol_type = other RNA
tgggcacattggaactgag

SEQ ID NO: 2124 - RNA, 19 nt, synthetic construct
  source 1..19: mol_type = other RNA
ctgggcacattggaactga

SEQ ID NO: 2125 - RNA, 19 nt, synthetic construct
  source 1..19: mol_type = other RNA
actgggcacattggaactg

SEQ ID NO: 2126 - RNA, 19 nt, synthetic construct
  source 1..19: mol_type = other RNA
gactgggcacattggaact

SEQ ID NO: 2127 - RNA, 19 nt, synthetic construct
  source 1..19: mol_type = other RNA
tgactgggcacattggaac

SEQ ID NO: 2128 - RNA, 19 nt, synthetic construct
  source 1..19: mol_type = other RNA
atgactgggcacattggaa

SEQ ID NO: 2129 - RNA, 19 nt, synthetic construct
  source 1..19: mol_type = other RNA
catgactgggcacattgga

SEQ ID NO: 2130 - RNA, 19 nt, synthetic construct
  source 1..19: mol_type = other RNA
tcatgactgggcacattgg

SEQ ID NO: 2131 - RNA, 19 nt, synthetic construct
  source 1..19: mol_type = other RNA
gtcatgactgggcacattg

SEQ ID NO: 2132 - RNA, 19 nt, synthetic construct
  source 1..19: mol_type = other RNA
cactgctgatggaagactt

SEQ ID NO: 2133 - RNA, 19 nt, synthetic construct
  source 1..19: mol_type = other RNA
tcactgctgatggaagact

SEQ ID NO: 2134 - RNA, 19 nt, synthetic construct
  source 1..19: mol_type = other RNA
atcactgctgatggaagac

SEQ ID NO: 2135 - RNA, 19 nt, synthetic construct
  source 1..19: mol_type = other RNA
gtagtcacttaggtgtttt

SEQ ID NO: 2136 - RNA, 19 nt, synthetic construct
  source 1..19: mol_type = other RNA
ggtagtcacttaggtgttt

SEQ ID NO: 2137 - RNA, 19 nt, synthetic construct
  source 1..19: mol_type = other RNA
tggtagtcacttaggtgtt

SEQ ID NO: 2138 - RNA, 19 nt, synthetic construct
  source 1..19: mol_type = other RNA
gtggtagtcacttaggtgt

SEQ ID NO: 2139 - RNA, 19 nt, synthetic construct
  source 1..19: mol_type = other RNA
agtggtagtcacttaggtg

SEQ ID NO: 2140 - RNA, 19 nt, synthetic construct
  source 1..19: mol_type = other RNA
aagtggtagtcacttaggt

SEQ ID NO: 2141 - RNA, 19 nt, synthetic construct
  source 1..19: mol_type = other RNA
taagtggtagtcacttagg

SEQ ID NO: 2142 - RNA, 19 nt, synthetic construct
  source 1..19: mol_type = other RNA
ataagtggtagtcacttag

SEQ ID NO: 2143 - RNA, 19 nt, synthetic construct
  source 1..19: mol_type = other RNA
aataagtggtagtcactta

SEQ ID NO: 2144 - RNA, 19 nt, synthetic construct
  source 1..19: mol_type = other RNA
aaataagtggtagtcactt

SEQ ID NO: 2145 - RNA, 19 nt, synthetic construct
  source 1..19: mol_type = other RNA
gaaataagtggtagtcact

SEQ ID NO: 2146 - RNA, 19 nt, synthetic construct
  source 1..19: mol_type = other RNA
agaaataagtggtagtcac

SEQ ID NO: 2147 - RNA, 19 nt, synthetic construct
  source 1..19: mol_type = other RNA
tagaaataagtggtagtca

SEQ ID NO: 2148 - RNA, 19 nt, synthetic construct
  source 1..19: mol_type = other RNA
ttagaaataagtggtagtc

SEQ ID NO: 2149 - RNA, 19 nt, synthetic construct
  source 1..19: mol_type = other RNA
tttagaaataagtggtagt

SEQ ID NO: 2150 - RNA, 19 nt, synthetic construct
  source 1..19: mol_type = other RNA
atttagaaataagtggtag

SEQ ID NO: 2151 - RNA, 19 nt, synthetic construct
  source 1..19: mol_type = other RNA
gatttagaaataagtggta

SEQ ID NO: 2152 - RNA, 19 nt, synthetic construct
  source 1..19: mol_type = other RNA
atattaacaaatttcacaa

SEQ ID NO: 2153 - RNA, 19 nt, synthetic construct
  source 1..19: mol_type = other RNA
tatattaacaaatttcaca

SEQ ID NO: 2154 - RNA, 19 nt, synthetic construct
  source 1..19: mol_type = other RNA
atatattaacaaatttcac

SEQ ID NO: 2155 - RNA, 19 nt, synthetic construct
  source 1..19: mol_type = other RNA
tatatattaacaaatttca

SEQ ID NO: 2156 - RNA, 19 nt, synthetic construct
  source 1..19: mol_type = other RNA
atatatattaacaaatttc

SEQ ID NO: 2157 - RNA, 19 nt, synthetic construct
  source 1..19: mol_type = other RNA
tttatatacaaacacaagt

SEQ ID NO: 2158 - RNA, 19 nt, synthetic construct
  source 1..19: mol_type = other RNA
atttatatacaaacacaag

SEQ ID NO: 2159 - RNA, 19 nt, synthetic construct
  source 1..19: mol_type = other RNA
catttatatacaaacacaa

SEQ ID NO: 2160 - RNA, 19 nt, synthetic construct
  source 1..19: mol_type = other RNA
ccatttatatacaaacaca

SEQ ID NO: 2161 - RNA, 19 nt, synthetic construct
  source 1..19: mol_type = other RNA
accatttatatacaaacac

SEQ ID NO: 2162 - RNA, 19 nt, synthetic construct
  source 1..19: mol_type = other RNA
caccatttatatacaaaca

SEQ ID NO: 2163 - RNA, 19 nt, synthetic construct
  source 1..19: mol_type = other RNA
tgaattcctttacaccaca

SEQ ID NO: 2164 - RNA, 19 nt, synthetic construct
  source 1..19: mol_type = other RNA
atgaattcctttacaccac

SEQ ID NO: 2165 - RNA, 19 nt, synthetic construct
  source 1..19: mol_type = other RNA
aatgaattcctttacacca

SEQ ID NO: 2166 - RNA, 19 nt, synthetic construct
  source 1..19: mol_type = other RNA
taatgaattcctttacacc

SEQ ID NO: 2167 - RNA, 19 nt, synthetic construct
  source 1..19: mol_type = other RNA
ctaatgaattcctttacac

SEQ ID NO: 2168 - RNA, 19 nt, synthetic construct
  source 1..19: mol_type = other RNA
gctaatgaattcctttaca

SEQ ID NO: 2169 - RNA, 19 nt, synthetic construct
  source 1..19: mol_type = other RNA
ggctaatgaattcctttac

SEQ ID NO: 2170 - RNA, 19 nt, synthetic construct
  source 1..19: mol_type = other RNA
tggctaatgaattccttta

SEQ ID NO: 2171 - RNA, 19 nt, synthetic construct
  source 1..19: mol_type = other RNA
atggctaatgaattccttt

SEQ ID NO: 2172 - RNA, 19 nt, synthetic construct
  source 1..19: mol_type = other RNA
catggctaatgaattcctt

SEQ ID NO: 2173 - RNA, 19 nt, synthetic construct
  source 1..19: mol_type = other RNA
ccatggctaatgaattcct

SEQ ID NO: 2174 - RNA, 19 nt, synthetic construct
  source 1..19: mol_type = other RNA
tccatggctaatgaattcc

SEQ ID NO: 2175 - RNA, 19 nt, synthetic construct
  source 1..19: mol_type = other RNA
atccatggctaatgaattc

SEQ ID NO: 2176 - RNA, 19 nt, synthetic construct
  source 1..19: mol_type = other RNA
catccatggctaatgaatt

SEQ ID NO: 2177 - RNA, 19 nt, synthetic construct
  source 1..19: mol_type = other RNA
acatccatggctaatgaat

SEQ ID NO: 2178 - RNA, 19 nt, synthetic construct
  source 1..19: mol_type = other RNA
tacatccatggctaatgaa

SEQ ID NO: 2179 - RNA, 19 nt, synthetic construct
  source 1..19: mol_type = other RNA
atacatccatggctaatga

SEQ ID NO: 2180 - RNA, 19 nt, synthetic construct
  source 1..19: mol_type = other RNA
aatacatccatggctaatg

SEQ ID NO: 2181 - RNA, 19 nt, synthetic construct
  source 1..19: mol_type = other RNA
gaatacatccatggctaat

SEQ ID NO: 2182 - RNA, 19 nt, synthetic construct
  source 1..19: mol_type = other RNA
tgaatacatccatggctaa

SEQ ID NO: 2183 - RNA, 19 nt, synthetic construct
  source 1..19: mol_type = other RNA
atgaatacatccatggcta

SEQ ID NO: 2184 - RNA, 19 nt, synthetic construct
  source 1..19: mol_type = other RNA
catgaatacatccatggct

SEQ ID NO: 2185 - RNA, 19 nt, synthetic construct
  source 1..19: mol_type = other RNA
tcatgaatacatccatggc

SEQ ID NO: 2186 - RNA, 19 nt, synthetic construct
  source 1..19: mol_type = other RNA
ttcatgaatacatccatgg

SEQ ID NO: 2187 - RNA, 19 nt, synthetic construct
  source 1..19: mol_type = other RNA
tttcatgaatacatccatg

SEQ ID NO: 2188 - RNA, 19 nt, synthetic construct
  source 1..19: mol_type = other RNA
ctttcatgaatacatccat

SEQ ID NO: 2189 - RNA, 19 nt, synthetic construct
  source 1..19: mol_type = other RNA
cctttcatgaatacatcca

SEQ ID NO: 2190 - RNA, 19 nt, synthetic construct
  source 1..19: mol_type = other RNA
tcctttcatgaatacatcc

SEQ ID NO: 2191 - RNA, 19 nt, synthetic construct
  source 1..19: mol_type = other RNA
gtcctttcatgaatacatc

SEQ ID NO: 2192 - RNA, 19 nt, synthetic construct
  source 1..19: mol_type = other RNA
agtcctttcatgaatacat

SEQ ID NO: 2193 - RNA, 19 nt, synthetic construct
  source 1..19: mol_type = other RNA
aaagtcctttcatgaatac

SEQ ID NO: 2194 - RNA, 19 nt, synthetic construct
  source 1..19: mol_type = other RNA
tgtctttcctgctgcttct

SEQ ID NO: 2195 - RNA, 19 nt, synthetic construct
  source 1..19: mol_type = other RNA
tcttttgtctttcctgctg

SEQ ID NO: 2196 - RNA, 19 nt, synthetic construct
  source 1..19: mol_type = other RNA
cctcttttgtctttcctgc

SEQ ID NO: 2197 - RNA, 19 nt, synthetic construct
  source 1..19: mol_type = other RNA
acaccctcttttgtctttc

SEQ ID NO: 2198 - RNA, 19 nt, synthetic construct
  source 1..19: mol_type = other RNA
aacaccctcttttgtcttt

SEQ ID NO: 2199 - RNA, 19 nt, synthetic construct
  source 1..19: mol_type = other RNA
agaacaccctcttttgtct

SEQ ID NO: 2200 - RNA, 19 nt, synthetic construct
  source 1..19: mol_type = other RNA
gagaacaccctcttttgtc

SEQ ID NO: 2201 - RNA, 19 nt, synthetic construct
  source 1..19: mol_type = other RNA
tacatagagaacaccctct

SEQ ID NO: 2202 - RNA, 19 nt, synthetic construct
  source 1..19: mol_type = other RNA
cctacatagagaacaccct

SEQ ID NO: 2203 - RNA, 19 nt, synthetic construct
  source 1..19: mol_type = other RNA
agcctacatagagaacacc

SEQ ID NO: 2204 - RNA, 19 nt, synthetic construct
  source 1..19: mol_type = other RNA
tagtcttgatacccttcct

SEQ ID NO: 2205 - RNA, 19 nt, synthetic construct
  source 1..19: mol_type = other RNA
tcgtagtcttgataccctt

SEQ ID NO: 2206 - RNA, 19 nt, synthetic construct
  source 1..19: mol_type = other RNA
ttcgtagtcttgataccct

SEQ ID NO: 2207 - RNA, 19 nt, synthetic construct
  source 1..19: mol_type = other RNA
tcaggttcgtagtcttgat

SEQ ID NO: 2208 - RNA, 19 nt, synthetic construct
  source 1..19: mol_type = other RNA
ttcaggttcgtagtcttga

SEQ ID NO: 2209 - RNA, 19 nt, synthetic construct
  source 1..19: mol_type = other RNA
gcttcaggttcgtagtctt

SEQ ID NO: 2210 - RNA, 19 nt, synthetic construct
  source 1..19: mol_type = other RNA
aggcttcaggttcgtagtc

SEQ ID NO: 2211 - RNA, 19 nt, synthetic construct
  source 1..19: mol_type = other RNA
taggcttcaggttcgtagt

SEQ ID NO: 2212 - RNA, 19 nt, synthetic construct
  source 1..19: mol_type = other RNA
ttaggcttcaggttcgtag

SEQ ID NO: 2213 - RNA, 19 nt, synthetic construct
  source 1..19: mol_type = other RNA
tcttaggcttcaggttcgt

SEQ ID NO: 2214 - RNA, 19 nt, synthetic construct
  source 1..19: mol_type = other RNA
ttcttaggcttcaggttcg

SEQ ID NO: 2215 - RNA, 19 nt, synthetic construct
  source 1..19: mol_type = other RNA
atttcttaggcttcaggtt

SEQ ID NO: 2216 - RNA, 19 nt, synthetic construct
  source 1..19: mol_type = other RNA
tatttcttaggcttcaggt

SEQ ID NO: 2217 - RNA, 19 nt, synthetic construct
  source 1..19: mol_type = other RNA
atatttcttaggcttcagg

SEQ ID NO: 2218 - RNA, 19 nt, synthetic construct
  source 1..19: mol_type = other RNA
gatatttcttaggcttcag

SEQ ID NO: 2219 - RNA, 19 nt, synthetic construct
  source 1..19: mol_type = other RNA
agatatttcttaggcttca

SEQ ID NO: 2220 - RNA, 19 nt, synthetic construct
  source 1..19: mol_type = other RNA
agcaaagatatttcttagg

SEQ ID NO: 2221 - RNA, 19 nt, synthetic construct
  source 1..19: mol_type = other RNA
gagcaaagatatttcttag

SEQ ID NO: 2222 - RNA, 19 nt, synthetic construct
  source 1..19: mol_type = other RNA
tgggagcaaagatatttct

SEQ ID NO: 2223 - RNA, 19 nt, synthetic construct
  source 1..19: mol_type = other RNA
aactgggagcaaagatatt

SEQ ID NO: 2224 - RNA, 19 nt, synthetic construct
  source 1..19: mol_type = other RNA
aaactgggagcaaagatat

SEQ ID NO: 2225 - RNA, 19 nt, synthetic construct
  source 1..19: mol_type = other RNA
agcagatctcaagaaactg

SEQ ID NO: 2226 - RNA, 19 nt, synthetic construct
  source 1..19: mol_type = other RNA
ggaactgagcacttgtaca

SEQ ID NO: 2227 - RNA, 19 nt, synthetic construct
  source 1..19: mol_type = other RNA
atgtcatgactgggcacat

SEQ ID NO: 2228 - RNA, 19 nt, synthetic construct
  source 1..19: mol_type = other RNA
aatgtcatgactgggcaca

SEQ ID NO: 2229 - RNA, 19 nt, synthetic construct
  source 1..19: mol_type = other RNA
aaatgtcatgactgggcac

SEQ ID NO: 2230 - RNA, 19 nt, synthetic construct
  source 1..19: mol_type = other RNA
ttgagaaatgtcatgactg

SEQ ID NO: 2231 - RNA, 19 nt, synthetic construct
  source 1..19: mol_type = other RNA
tttgagaaatgtcatgact

SEQ ID NO: 2232 - RNA, 19 nt, synthetic construct
  source 1..19: mol_type = other RNA
ctttgagaaatgtcatgac

SEQ ID NO: 2233 - RNA, 19 nt, synthetic construct
  source 1..19: mol_type = other RNA
actttgagaaatgtcatga

SEQ ID NO: 2234 - RNA, 19 nt, synthetic construct
  source 1..19: mol_type = other RNA
aactttgagaaatgtcatg

SEQ ID NO: 2235 - RNA, 19 nt, synthetic construct
  source 1..19: mol_type = other RNA
aaactttgagaaatgtcat

SEQ ID NO: 2236 - RNA, 19 nt, synthetic construct
  source 1..19: mol_type = other RNA
aaaactttgagaaatgtca

SEQ ID NO: 2237 - RNA, 19 nt, synthetic construct
  source 1..19: mol_type = other RNA
aaaaactttgagaaatgtc

SEQ ID NO: 2238 - RNA, 19 nt, synthetic construct
  source 1..19: mol_type = other RNA
taaaaactttgagaaatgt

SEQ ID NO: 2239 - RNA, 19 nt, synthetic construct
  source 1..19: mol_type = other RNA
gtaaaaactttgagaaatg

SEQ ID NO: 2240 - RNA, 19 nt, synthetic construct
  source 1..19: mol_type = other RNA
tgtaaaaactttgagaaat

SEQ ID NO: 2241 - RNA, 19 nt, synthetic construct
  source 1..19: mol_type = other RNA
ctgtaaaaactttgagaaa

SEQ ID NO: 2242 - RNA, 19 nt, synthetic construct
  source 1..19: mol_type = other RNA
actgctgatggaagacttc

SEQ ID NO: 2243 - RNA, 19 nt, synthetic construct
  source 1..19: mol_type = other RNA
tcaatcactgctgatggaa

SEQ ID NO: 2244 - RNA, 19 nt, synthetic construct
  source 1..19: mol_type = other RNA
ttcaatcactgctgatgga

SEQ ID NO: 2245 - RNA, 19 nt, synthetic construct
  source 1..19: mol_type = other RNA
cttcaatcactgctgatgg

SEQ ID NO: 2246 - RNA, 19 nt, synthetic construct
  source 1..19: mol_type = other RNA
acttcaatcactgctgatg

SEQ ID NO: 2247 - RNA, 19 nt, synthetic construct
  source 1..19: mol_type = other RNA
tacttcaatcactgctgat

SEQ ID NO: 2248 - RNA, 19 nt, synthetic construct
  source 1..19: mol_type = other RNA
atacttcaatcactgctga

SEQ ID NO: 2249 - RNA, 19 nt, synthetic construct
  source 1..19: mol_type = other RNA
gatacttcaatcactgctg

SEQ ID NO: 2250 - RNA, 19 nt, synthetic construct
  source 1..19: mol_type = other RNA
agatacttcaatcactgct

SEQ ID NO: 2251 - RNA, 19 nt, synthetic construct
  source 1..19: mol_type = other RNA
cagatacttcaatcactgc

SEQ ID NO: 2252 - RNA, 19 nt, synthetic construct
  source 1..19: mol_type = other RNA
acagatacttcaatcactg

SEQ ID NO: 2253 - RNA, 19 nt, synthetic construct
  source 1..19: mol_type = other RNA
tacagatacttcaatcact

SEQ ID NO: 2254 - RNA, 19 nt, synthetic construct
  source 1..19: mol_type = other RNA
caggtacagatacttcaat

SEQ ID NO: 2255 - RNA, 19 nt, synthetic construct
  source 1..19: mol_type = other RNA
aaagggaagcaccgaaatg

SEQ ID NO: 2256 - RNA, 19 nt, synthetic construct
  source 1..19: mol_type = other RNA
cagtgaaagggaagcaccg

SEQ ID NO: 2257 - RNA, 19 nt, synthetic construct
  source 1..19: mol_type = other RNA
tcagtgaaagggaagcacc

SEQ ID NO: 2258 - RNA, 19 nt, synthetic construct
  source 1..19: mol_type = other RNA
ttcagtgaaagggaagcac

SEQ ID NO: 2259 - RNA, 19 nt, synthetic construct
  source 1..19: mol_type = other RNA
cttcagtgaaagggaagca

SEQ ID NO: 2260 - RNA, 19 nt, synthetic construct
  source 1..19: mol_type = other RNA
acttcagtgaaagggaagc

SEQ ID NO: 2261 - RNA, 19 nt, synthetic construct
  source 1..19: mol_type = other RNA
cacttcagtgaaagggaag

SEQ ID NO: 2262 - RNA, 19 nt, synthetic construct
  source 1..19: mol_type = other RNA
tcacttcagtgaaagggaa

SEQ ID NO: 2263 - RNA, 19 nt, synthetic construct
  source 1..19: mol_type = other RNA
ttcacttcagtgaaaggga

SEQ ID NO: 2264 - RNA, 19 nt, synthetic construct
  source 1..19: mol_type = other RNA
attcacttcagtgaaaggg

SEQ ID NO: 2265 - RNA, 19 nt, synthetic construct
  source 1..19: mol_type = other RNA
tattcacttcagtgaaagg

SEQ ID NO: 2266 - RNA, 19 nt, synthetic construct
  source 1..19: mol_type = other RNA
gtattcacttcagtgaaag

SEQ ID NO: 2267 - RNA, 19 nt, synthetic construct
  source 1..19: mol_type = other RNA
tgtattcacttcagtgaaa

SEQ ID NO: 2268 - RNA, 19 nt, synthetic construct
  source 1..19: mol_type = other RNA
atgtattcacttcagtgaa

SEQ ID NO: 2269 - RNA, 19 nt, synthetic construct
  source 1..19: mol_type = other RNA
catgtattcacttcagtga

SEQ ID NO: 2270 - RNA, 19 nt, synthetic construct
  source 1..19: mol_type = other RNA
ccatgtattcacttcagtg

SEQ ID NO: 2271 - RNA, 19 nt, synthetic construct
  source 1..19: mol_type = other RNA
accatgtattcacttcagt

SEQ ID NO: 2272 - RNA, 19 nt, synthetic construct
  source 1..19: mol_type = other RNA
taccatgtattcacttcag

SEQ ID NO: 2273 - RNA, 19 nt, synthetic construct
  source 1..19: mol_type = other RNA
ctaccatgtattcacttca

SEQ ID NO: 2274 - RNA, 19 nt, synthetic construct
  source 1..19: mol_type = other RNA
tgctaccatgtattcactt

SEQ ID NO: 2275 - RNA, 19 nt, synthetic construct
  source 1..19: mol_type = other RNA
ctgctaccatgtattcact

SEQ ID NO: 2276 - RNA, 19 nt, synthetic construct
  source 1..19: mol_type = other RNA
cctgctaccatgtattcac

SEQ ID NO: 2277 - RNA, 19 nt, synthetic construct
  source 1..19: mol_type = other RNA
accctgctaccatgtattc

SEQ ID NO: 2278 - RNA, 19 nt, synthetic construct
  source 1..19: mol_type = other RNA
gaccctgctaccatgtatt

SEQ ID NO: 2279 - RNA, 19 nt, synthetic construct
  source 1..19: mol_type = other RNA
acacaaagaccctgctacc

SEQ ID NO: 2280 - RNA, 19 nt, synthetic construct
  source 1..19: mol_type = other RNA
cacagcacacaaagaccct

SEQ ID NO: 2281 - RNA, 19 nt, synthetic construct
  source 1..19: mol_type = other RNA
tccacagcacacaaagacc

SEQ ID NO: 2282 - RNA, 19 nt, synthetic construct
  source 1..19: mol_type = other RNA
acaaaatccacagcacaca

SEQ ID NO: 2283 - RNA, 19 nt, synthetic construct
  source 1..19: mol_type = other RNA
cacaaaatccacagcacac

SEQ ID NO: 2284 - RNA, 19 nt, synthetic construct
  source 1..19: mol_type = other RNA
ccacaaaatccacagcaca

SEQ ID NO: 2285 - RNA, 19 nt, synthetic construct
  source 1..19: mol_type = other RNA
gccacaaaatccacagcac

SEQ ID NO: 2286 - RNA, 19 nt, synthetic construct
  source 1..19: mol_type = other RNA
agccacaaaatccacagca

SEQ ID NO: 2287 - RNA, 19 nt, synthetic construct
  source 1..19: mol_type = other RNA
aagccacaaaatccacagc

SEQ ID NO: 2288 - RNA, 19 nt, synthetic construct
  source 1..19: mol_type = other RNA
gaagccacaaaatccacag

SEQ ID NO: 2289 - RNA, 19 nt, synthetic construct
  source 1..19: mol_type = other RNA
ttgaagccacaaaatccac

SEQ ID NO: 2290 - RNA, 19 nt, synthetic construct
  source 1..19: mol_type = other RNA
attgaagccacaaaatcca

SEQ ID NO: 2291 - RNA, 19 nt, synthetic construct
  source 1..19: mol_type = other RNA
agattgaagccacaaaatc

SEQ ID NO: 2292 - RNA, 19 nt, synthetic construct
  source 1..19: mol_type = other RNA
tagattgaagccacaaaat

SEQ ID NO: 2293 - RNA, 19 nt, synthetic construct
  source 1..19: mol_type = other RNA
aggatttagaaataagtgg

SEQ ID NO: 2294 - RNA, 19 nt, synthetic construct
  source 1..19: mol_type = other RNA
gaggatttagaaataagtg

SEQ ID NO: 2295 - RNA, 19 nt, synthetic construct
  source 1..19: mol_type = other RNA
tgaggatttagaaataagt

SEQ ID NO: 2296 - RNA, 19 nt, synthetic construct
  source 1..19: mol_type = other RNA
gtgaggatttagaaataag

SEQ ID NO: 2297 - RNA, 19 nt, synthetic construct
  source 1..19: mol_type = other RNA
tagtgaggatttagaaata

SEQ ID NO: 2298 - RNA, 19 nt, synthetic construct
  source 1..19: mol_type = other RNA
atagtgaggatttagaaat

SEQ ID NO: 2299 - RNA, 19 nt, synthetic construct
  source 1..19: mol_type = other RNA
aatagtgaggatttagaaa

SEQ ID NO: 2300 - RNA, 19 nt, synthetic construct
  source 1..19: mol_type = other RNA
aaatagtgaggatttagaa

SEQ ID NO: 2301 - RNA, 19 nt, synthetic construct
  source 1..19: mol_type = other RNA
aaaatagtgaggatttaga

SEQ ID NO: 2302 - RNA, 19 nt, synthetic construct
  source 1..19: mol_type = other RNA
aaaaatagtgaggatttag

SEQ ID NO: 2303 - RNA, 19 nt, synthetic construct
  source 1..19: mol_type = other RNA
aaaaaatagtgaggattta

SEQ ID NO: 2304 - RNA, 19 nt, synthetic construct
  source 1..19: mol_type = other RNA
aaaaaaatagtgaggattt

SEQ ID NO: 2305 - RNA, 19 nt, synthetic construct
  source 1..19: mol_type = other RNA
caaaaaaatagtgaggatt

SEQ ID NO: 2306 - RNA, 19 nt, synthetic construct
  source 1..19: mol_type = other RNA
acaaaaaaatagtgaggat

SEQ ID NO: 2307 - RNA, 19 nt, synthetic construct
  source 1..19: mol_type = other RNA
aacaaaaaaatagtgagga

SEQ ID NO: 2308 - RNA, 19 nt, synthetic construct
  source 1..19: mol_type = other RNA
caacaaaaaaatagtgagg

SEQ ID NO: 2309 - RNA, 19 nt, synthetic construct
  source 1..19: mol_type = other RNA
gcaacaaaaaaatagtgag

SEQ ID NO: 2310 - RNA, 19 nt, synthetic construct
  source 1..19: mol_type = other RNA
agcaacaaaaaaatagtga

SEQ ID NO: 2311 - RNA, 19 nt, synthetic construct
  source 1..19: mol_type = other RNA
cagcaacaaaaaaatagtg

SEQ ID NO: 2312 - RNA, 19 nt, synthetic construct
  source 1..19: mol_type = other RNA
acagcaacaaaaaaatagt

SEQ ID NO: 2313 - RNA, 19 nt, synthetic construct
  source 1..19: mol_type = other RNA
aacagcaacaaaaaaatag

SEQ ID NO: 2314 - RNA, 19 nt, synthetic construct
  source 1..19: mol_type = other RNA
caacagcaacaaaaaaata

SEQ ID NO: 2315 - RNA, 19 nt, synthetic construct
  source 1..19: mol_type = other RNA
acaacagcaacaaaaaaat

SEQ ID NO: 2316 - RNA, 19 nt, synthetic construct
  source 1..19: mol_type = other RNA
aacaacagcaacaaaaaaa

SEQ ID NO: 2317 - RNA, 19 nt, synthetic construct
  source 1..19: mol_type = other RNA
gaacaacagcaacaaaaaa

SEQ ID NO: 2318 - RNA, 19 nt, synthetic construct
  source 1..19: mol_type = other RNA
tgaacaacagcaacaaaaa

SEQ ID NO: 2319 - RNA, 19 nt, synthetic construct
  source 1..19: mol_type = other RNA
ctgaacaacagcaacaaaa

SEQ ID NO: 2320 - RNA, 19 nt, synthetic construct
  source 1..19: mol_type = other RNA
tctgaacaacagcaacaaa

SEQ ID NO: 2321 - RNA, 19 nt, synthetic construct
  source 1..19: mol_type = other RNA
ttctgaacaacagcaacaa

SEQ ID NO: 2322 - RNA, 19 nt, synthetic construct
  source 1..19: mol_type = other RNA
cttctgaacaacagcaaca

SEQ ID NO: 2323 - RNA, 19 nt, synthetic construct
  source 1..19: mol_type = other RNA
acttctgaacaacagcaac

SEQ ID NO: 2324 - RNA, 19 nt, synthetic construct
  source 1..19: mol_type = other RNA
aacttctgaacaacagcaa

SEQ ID NO: 2325 - RNA, 19 nt, synthetic construct
  source 1..19: mol_type = other RNA
caacttctgaacaacagca

SEQ ID NO: 2326 - RNA, 19 nt, synthetic construct
  source 1..19: mol_type = other RNA
acaacttctgaacaacagc

SEQ ID NO: 2327 - RNA, 19 nt, synthetic construct
  source 1..19: mol_type = other RNA
aacaacttctgaacaacag

SEQ ID NO: 2328 - RNA, 19 nt, synthetic construct
  source 1..19: mol_type = other RNA
taacaacttctgaacaaca

SEQ ID NO: 2329 - RNA, 19 nt, synthetic construct
  source 1..19: mol_type = other RNA
ctaacaacttctgaacaac

SEQ ID NO: 2330 - RNA, 19 nt, synthetic construct
  source 1..19: mol_type = other RNA
actaacaacttctgaacaa

SEQ ID NO: 2331 - RNA, 19 nt, synthetic construct
  source 1..19: mol_type = other RNA
cactaacaacttctgaaca

SEQ ID NO: 2332 - RNA, 19 nt, synthetic construct
  source 1..19: mol_type = other RNA
tcactaacaacttctgaac

SEQ ID NO: 2333 - RNA, 19 nt, synthetic construct
  source 1..19: mol_type = other RNA
atcactaacaacttctgaa

SEQ ID NO: 2334 - RNA, 19 nt, synthetic construct
  source 1..19: mol_type = other RNA
aatcactaacaacttctga

SEQ ID NO: 2335 - RNA, 19 nt, synthetic construct
  source 1..19: mol_type = other RNA
aaatcactaacaacttctg

SEQ ID NO: 2336 - RNA, 19 nt, synthetic construct
  source 1..19: mol_type = other RNA
caaatcactaacaacttct

SEQ ID NO: 2337 - RNA, 19 nt, synthetic construct
  source 1..19: mol_type = other RNA
gcaaatcactaacaacttc

SEQ ID NO: 2338 - RNA, 19 nt, synthetic construct
  source 1..19: mol_type = other RNA
agcaaatcactaacaactt

SEQ ID NO: 2339 - RNA, 19 nt, synthetic construct
  source 1..19: mol_type = other RNA
tagcaaatcactaacaact

SEQ ID NO: 2340 - RNA, 19 nt, synthetic construct
  source 1..19: mol_type = other RNA
atagcaaatcactaacaac

SEQ ID NO: 2341 - RNA, 19 nt, synthetic construct
  source 1..19: mol_type = other RNA
gatagcaaatcactaacaa

SEQ ID NO: 2342 - RNA, 19 nt, synthetic construct
  source 1..19: mol_type = other RNA
cacctaaaaatcttataat

SEQ ID NO: 2343 - RNA, 19 nt, synthetic construct
  source 1..19: mol_type = other RNA
acacctaaaaatcttataa

SEQ ID NO: 2344 - RNA, 19 nt, synthetic construct
  source 1..19: mol_type = other RNA
gacacctaaaaatcttata

SEQ ID NO: 2345 - RNA, 19 nt, synthetic construct
  source 1..19: mol_type = other RNA
agacacctaaaaatcttat

SEQ ID NO: 2346 - RNA, 19 nt, synthetic construct
  source 1..19: mol_type = other RNA
aagacacctaaaaatctta

SEQ ID NO: 2347 - RNA, 19 nt, synthetic construct
  source 1..19: mol_type = other RNA
aaagacacctaaaaatctt

SEQ ID NO: 2348 - RNA, 19 nt, synthetic construct
  source 1..19: mol_type = other RNA
aaaagacacctaaaaatct

SEQ ID NO: 2349 - RNA, 19 nt, synthetic construct
  source 1..19: mol_type = other RNA
taaaagacacctaaaaatc

SEQ ID NO: 2350 - RNA, 19 nt, synthetic construct
  source 1..19: mol_type = other RNA
ttaaaagacacctaaaaat

SEQ ID NO: 2351 - RNA, 19 nt, synthetic construct
  source 1..19: mol_type = other RNA
attaaaagacacctaaaaa

SEQ ID NO: 2352 - RNA, 19 nt, synthetic construct
  source 1..19: mol_type = other RNA
cattaaaagacacctaaaa

SEQ ID NO: 2353 - RNA, 19 nt, synthetic construct
  source 1..19: mol_type = other RNA
tcattaaaagacacctaaa

SEQ ID NO: 2354 - RNA, 19 nt, synthetic construct
  source 1..19: mol_type = other RNA
atcattaaaagacacctaa

SEQ ID NO: 2355 - RNA, 19 nt, synthetic construct
  source 1..19: mol_type = other RNA
tatcattaaaagacaccta

SEQ ID NO: 2356 - RNA, 19 nt, synthetic construct
  source 1..19: mol_type = other RNA
gtatcattaaaagacacct

SEQ ID NO: 2357 - RNA, 19 nt, synthetic construct
  source 1..19: mol_type = other RNA
agtatcattaaaagacacc

SEQ ID NO: 2358 - RNA, 19 nt, synthetic construct
  source 1..19: mol_type = other RNA
cagtatcattaaaagacac

SEQ ID NO: 2359 - RNA, 19 nt, synthetic construct
  source 1..19: mol_type = other RNA
acagtatcattaaaagaca

SEQ ID NO: 2360 - RNA, 19 nt, synthetic construct
  source 1..19: mol_type = other RNA
gacagtatcattaaaagac

SEQ ID NO: 2361 - RNA, 19 nt, synthetic construct
  source 1..19: mol_type = other RNA
agacagtatcattaaaaga

SEQ ID NO: 2362 - RNA, 19 nt, synthetic construct
  source 1..19: mol_type = other RNA
tagacagtatcattaaaag

SEQ ID NO: 2363 - RNA, 19 nt, synthetic construct
  source 1..19: mol_type = other RNA
ttagacagtatcattaaaa

SEQ ID NO: 2364 - RNA, 19 nt, synthetic construct
  source 1..19: mol_type = other RNA
cttagacagtatcattaaa

SEQ ID NO: 2365 - RNA, 19 nt, synthetic construct
  source 1..19: mol_type = other RNA
tcttagacagtatcattaa

SEQ ID NO: 2366 - RNA, 19 nt, synthetic construct
  source 1..19: mol_type = other RNA
ttcttagacagtatcatta

SEQ ID NO: 2367 - RNA, 19 nt, synthetic construct
  source 1..19: mol_type = other RNA
attcttagacagtatcatt

SEQ ID NO: 2368 - RNA, 19 nt, synthetic construct
  source 1..19: mol_type = other RNA
tattcttagacagtatcat

SEQ ID NO: 2369 - RNA, 19 nt, synthetic construct
  source 1..19: mol_type = other RNA
ttattcttagacagtatca

SEQ ID NO: 2370 - RNA, 19 nt, synthetic construct
  source 1..19: mol_type = other RNA
attattcttagacagtatc

SEQ ID NO: 2371 - RNA, 19 nt, synthetic construct
  source 1..19: mol_type = other RNA
cattattcttagacagtat

SEQ ID NO: 2372 - RNA, 19 nt, synthetic construct
  source 1..19: mol_type = other RNA
tcattattcttagacagta

SEQ ID NO: 2373 - RNA, 19 nt, synthetic construct
  source 1..19: mol_type = other RNA
ttaacaaatttcacaatac

SEQ ID NO: 2374 - RNA, 19 nt, synthetic construct
  source 1..19: mol_type = other RNA
attaacaaatttcacaata

SEQ ID NO: 2375 - RNA, 19 nt, synthetic construct
  source 1..19: mol_type = other RNA
tattaacaaatttcacaat

SEQ ID NO: 2376 - RNA, 19 nt, synthetic construct
  source 1..19: mol_type = other RNA
tatatatattaacaaattt

SEQ ID NO: 2377 - RNA, 19 nt, synthetic construct
  source 1..19: mol_type = other RNA
ttatatatattaacaaatt

SEQ ID NO: 2378 - RNA, 19 nt, synthetic construct
  source 1..19: mol_type = other RNA
attatatatattaacaaat

SEQ ID NO: 2379 - RNA, 19 nt, synthetic construct
  source 1..19: mol_type = other RNA
tattatatatattaacaaa

SEQ ID NO: 2380 - RNA, 19 nt, synthetic construct
  source 1..19: mol_type = other RNA
gtattatatatattaacaa

SEQ ID NO: 2381 - RNA, 19 nt, synthetic construct
  source 1..19: mol_type = other RNA
agtattatatatattaaca

SEQ ID NO: 2382 - RNA, 19 nt, synthetic construct
  source 1..19: mol_type = other RNA
aagtattatatatattaac

SEQ ID NO: 2383 - RNA, 19 nt, synthetic construct
  source 1..19: mol_type = other RNA
taagtattatatatattaa

SEQ ID NO: 2384 - RNA, 19 nt, synthetic construct
  source 1..19: mol_type = other RNA
atagtttcatgctcacata

SEQ ID NO: 2385 - RNA, 19 nt, synthetic construct
  source 1..19: mol_type = other RNA
catagtttcatgctcacat

SEQ ID NO: 2386 - RNA, 19 nt, synthetic construct
  source 1..19: mol_type = other RNA
tgcatagtttcatgctcac

SEQ ID NO: 2387 - RNA, 19 nt, synthetic construct
  source 1..19: mol_type = other RNA
gtgcatagtttcatgctca

SEQ ID NO: 2388 - RNA, 19 nt, synthetic construct
  source 1..19: mol_type = other RNA
ggtgcatagtttcatgctc

SEQ ID NO: 2389 - RNA, 19 nt, synthetic construct
  source 1..19: mol_type = other RNA
aggtgcatagtttcatgct

SEQ ID NO: 2390 - RNA, 19 nt, synthetic construct
  source 1..19: mol_type = other RNA
taggtgcatagtttcatgc

SEQ ID NO: 2391 - RNA, 19 nt, synthetic construct
  source 1..19: mol_type = other RNA
ataggtgcatagtttcatg

SEQ ID NO: 2392 - RNA, 19 nt, synthetic construct
  source 1..19: mol_type = other RNA
tataggtgcatagtttcat

SEQ ID NO: 2393 - RNA, 19 nt, synthetic construct
  source 1..19: mol_type = other RNA
ttataggtgcatagtttca

SEQ ID NO: 2394 - RNA, 19 nt, synthetic construct
  source 1..19: mol_type = other RNA
tttataggtgcatagtttc

SEQ ID NO: 2395 - RNA, 19 nt, synthetic construct
  source 1..19: mol_type = other RNA
atttataggtgcatagttt

SEQ ID NO: 2396 - RNA, 19 nt, synthetic construct
  source 1..19: mol_type = other RNA
tatttataggtgcatagtt

SEQ ID NO: 2397 - RNA, 19 nt, synthetic construct
  source 1..19: mol_type = other RNA
gtatttataggtgcatagt

SEQ ID NO: 2398 - RNA, 19 nt, synthetic construct
  source 1..19: mol_type = other RNA
agtatttataggtgcatag

SEQ ID NO: 2399 - RNA, 19 nt, synthetic construct
  source 1..19: mol_type = other RNA
tagtatttataggtgcata

SEQ ID NO: 2400 - RNA, 19 nt, synthetic construct
  source 1..19: mol_type = other RNA
ttagtatttataggtgcat

SEQ ID NO: 2401 - RNA, 19 nt, synthetic construct
  source 1..19: mol_type = other RNA
tcaccatttatatacaaac

SEQ ID NO: 2402 - RNA, 19 nt, synthetic construct
  source 1..19: mol_type = other RNA
ctcaccatttatatacaaa

SEQ ID NO: 2403 - RNA, 19 nt, synthetic construct
  source 1..19: mol_type = other RNA
tctcaccatttatatacaa

SEQ ID NO: 2404 - RNA, 19 nt, synthetic construct
  source 1..19: mol_type = other RNA
ttctcaccatttatataca

SEQ ID NO: 2405 - RNA, 19 nt, synthetic construct
  source 1..19: mol_type = other RNA
attctcaccatttatatac

SEQ ID NO: 2406 - RNA, 19 nt, synthetic construct
  source 1..19: mol_type = other RNA
aattctcaccatttatata

SEQ ID NO: 2407 - RNA, 19 nt, synthetic construct
  source 1..19: mol_type = other RNA
taattctcaccatttatat

SEQ ID NO: 2408 - RNA, 19 nt, synthetic construct
  source 1..19: mol_type = other RNA
ttaattctcaccatttata

SEQ ID NO: 2409 - RNA, 19 nt, synthetic construct
  source 1..19: mol_type = other RNA
tttaattctcaccatttat

SEQ ID NO: 2410 - RNA, 19 nt, synthetic construct
  source 1..19: mol_type = other RNA
ttttaattctcaccattta

SEQ ID NO: 2411 - RNA, 19 nt, synthetic construct
  source 1..19: mol_type = other RNA
attttaattctcaccattt

SEQ ID NO: 2412 - RNA, 19 nt, synthetic construct
  source 1..19: mol_type = other RNA
tattttaattctcaccatt

SEQ ID NO: 2413 - RNA, 19 nt, synthetic construct
  source 1..19: mol_type = other RNA
ttattttaattctcaccat

SEQ ID NO: 2414 - RNA, 19 nt, synthetic construct
  source 1..19: mol_type = other RNA
tttattttaattctcacca

SEQ ID NO: 2415 - RNA, 19 nt, synthetic construct
  source 1..19: mol_type = other RNA
ttttattttaattctcacc

SEQ ID NO: 2416 - RNA, 19 nt, synthetic construct
  source 1..19: mol_type = other RNA
tgagatgggataaaaataa

SEQ ID NO: 2417 - RNA, 19 nt, synthetic construct
  source 1..19: mol_type = other RNA
agtgagatgggataaaaat

SEQ ID NO: 2418 - RNA, 19 nt, synthetic construct
  source 1..19: mol_type = other RNA
aagtgagatgggataaaaa

SEQ ID NO: 2419 - RNA, 19 nt, synthetic construct
  source 1..19: mol_type = other RNA
aaagtgagatgggataaaa

SEQ ID NO: 2420 - RNA, 19 nt, synthetic construct
  source 1..19: mol_type = other RNA
taaagtgagatgggataaa

SEQ ID NO: 2421 - RNA, 19 nt, synthetic construct
  source 1..19: mol_type = other RNA
ttaaagtgagatgggataa

SEQ ID NO: 2422 - RNA, 19 nt, synthetic construct
  source 1..19: mol_type = other RNA
attaaagtgagatgggata

SEQ ID NO: 2423 - RNA, 19 nt, synthetic construct
  source 1..19: mol_type = other RNA
tattaaagtgagatgggat

SEQ ID NO: 2424 - RNA, 19 nt, synthetic construct
  source 1..19: mol_type = other RNA
ttattaaagtgagatggga

SEQ ID NO: 2425 - RNA, 19 nt, synthetic construct
  source 1..19: mol_type = other RNA
attattaaagtgagatggg

SEQ ID NO: 2426 - RNA, 19 nt, synthetic construct
  source 1..19: mol_type = other RNA
tattattaaagtgagatgg

SEQ ID NO: 2427 - RNA, 19 nt, synthetic construct
  source 1..19: mol_type = other RNA
ttattattaaagtgagatg

SEQ ID NO: 2428 - RNA, 19 nt, synthetic construct
  source 1..19: mol_type = other RNA
tttattattaaagtgagat

SEQ ID NO: 2429 - RNA, 19 nt, synthetic construct
  source 1..19: mol_type = other RNA
ttttattattaaagtgaga

SEQ ID NO: 2430 - RNA, 19 nt, synthetic construct
  source 1..19: mol_type = other RNA
tttttattattaaagtgag

SEQ ID NO: 2431 - RNA, 19 nt, synthetic construct
  source 1..19: mol_type = other RNA
atttttattattaaagtga

SEQ ID NO: 2432 - RNA, 19 nt, synthetic construct
  source 1..19: mol_type = other RNA
gatttttattattaaagtg

SEQ ID NO: 2433 - RNA, 19 nt, synthetic construct
  source 1..19: mol_type = other RNA
aattcctccttcttcaaat

SEQ ID NO: 2434 - RNA, 19 nt, synthetic construct
  source 1..19: mol_type = other RNA
tctacctcttctaaaattc

SEQ ID NO: 2435 - RNA, 19 nt, synthetic construct
  source 1..19: mol_type = other RNA
cattttctctacctcttct

SEQ ID NO: 2436 - RNA, 19 nt, synthetic construct
  source 1..19: mol_type = other RNA
ccattttctctacctcttc

SEQ ID NO: 2437 - RNA, 19 nt, synthetic construct
  source 1..19: mol_type = other RNA
tccattttctctacctctt

SEQ ID NO: 2438 - RNA, 19 nt, synthetic construct
  source 1..19: mol_type = other RNA
ttccattttctctacctct

SEQ ID NO: 2439 - RNA, 19 nt, synthetic construct
  source 1..19: mol_type = other RNA
gttccattttctctacctc

SEQ ID NO: 2440 - RNA, 19 nt, synthetic construct
  source 1..19: mol_type = other RNA
tgttccattttctctacct

SEQ ID NO: 2441 - RNA, 19 nt, synthetic construct
  source 1..19: mol_type = other RNA
aatgttccattttctctac

SEQ ID NO: 2442 - RNA, 19 nt, synthetic construct
  source 1..19: mol_type = other RNA
taatgttccattttctcta

SEQ ID NO: 2443 - RNA, 19 nt, synthetic construct
  source 1..19: mol_type = other RNA
ttaatgttccattttctct

SEQ ID NO: 2444 - RNA, 19 nt, synthetic construct
  source 1..19: mol_type = other RNA
gttaatgttccattttctc

SEQ ID NO: 2445 - RNA, 19 nt, synthetic construct
  source 1..19: mol_type = other RNA
ggttaatgttccattttct

SEQ ID NO: 2446 - RNA, 19 nt, synthetic construct
  source 1..19: mol_type = other RNA
gggttaatgttccattttc

SEQ ID NO: 2447 - RNA, 19 nt, synthetic construct
  source 1..19: mol_type = other RNA
agggttaatgttccatttt

SEQ ID NO: 2448 - RNA, 19 nt, synthetic construct
  source 1..19: mol_type = other RNA
tgtagggttaatgttccat

SEQ ID NO: 2449 - RNA, 19 nt, synthetic construct
  source 1..19: mol_type = other RNA
aaaacacacttctggcagt

SEQ ID NO: 2450 - RNA, 19 nt, synthetic construct
  source 1..19: mol_type = other RNA
caaaacacacttctggcag

SEQ ID NO: 2451 - DNA, 21 bp, synthetic construct
  source 1..21: mol_type = other DNA
agggtgttctctatgtaggct

SEQ ID NO: 2452 - DNA, 21 bp, synthetic construct
  source 1..21: mol_type = other DNA
actgctcctccaacatttgtc

SEQ ID NO: 2453 - DNA, 16 bp, synthetic construct
  source 1..16: mol_type = other DNA
  modified_base 1: mod_base = OTHER; note = tgctctttg-ZEN quencher modified nucleotide
gtcttctcagccactg

SEQ ID NO: 2454 - DNA, 20 bp, synthetic construct
  source 1..20: mol_type = other DNA
acagtggctgagaagaccaa

SEQ ID NO: 2455 - DNA, 20 bp, synthetic construct
  source 1..20: mol_type = other DNA
ctccctccactgtcttctgg

SEQ ID NO: 2456 - DNA, 21 bp, synthetic construct
  source 1..21: mol_type = other DNA
acccgtcaccaccgctcctcc

SEQ ID NO: 2457 - protein, 5 aa, synthetic construct
CREKA

1. A RNAi oligonucleotide for reducing SNCA gene expression, the oligonucleotide comprising a sense strand and an antisense strand, wherein the sense strand is 15 to 50 nucleotides in length, wherein the sense strand and the antisense strand form a duplex region, wherein the antisense strand comprises a region of complementarity to a SNCA mRNA target sequence of any one of SEQ ID NOs: 1683-2066, and wherein the region of complementarity is at least 15 contiguous nucleotides in length.

2. (canceled)

3. (canceled)

4. The RNAi oligonucleotide of claim 1, wherein the antisense strand is 15 to 30 nucleotides in length, optionally wherein the antisense strand is 22 nucleotides in length and wherein antisense strand and the sense strand form a duplex region of at least 19 nucleotides in length, optionally at least 20 nucleotides in length.

5-8. (canceled)

9. The RNAi oligonucleotide of claim 1, wherein the 3′ end of the sense strand comprises a stem-loop set forth as S1-L-S2, wherein S1 is complementary to S2, and wherein L forms a loop between S1 and S2 of 3-5 nucleotides in length.

10. The RNAi oligonucleotide of claim 9, wherein L is a triloop or a tetraloop, optionally wherein the tetraloop comprises the sequence 5′-GAAA-3′.

11. (canceled)

12. (canceled)

13. The RNAi oligonucleotide of claim 9, wherein the S1 and S2 are 1-10 nucleotides in length and have the same length, optionally wherein the stem-loop comprises the sequence 5′-GCAGCCGAAAGGCUGC-3′ (SEQ ID NO: 1680).

14.-16. (canceled)

17. The RNAi oligonucleotide of claim 1, wherein the oligonucleotide comprises a blunt end, optionally the blunt end comprises the 3′ end of the sense strand, and optionally wherein the sense strand is 20-22 nucleotides.

18.-20. (canceled)

21. The RNAi oligonucleotide of claim 1, wherein the antisense strand comprises a 3′ overhang sequence of one or more nucleotides in length, optionally wherein the 3′ overhang sequence is 2 nucleotides in length, and optionally wherein the 3′ overhang is selected from AA, GG, AG, and GA.

22.-26. (canceled)

27. The RNAi oligonucleotide of claim 1, wherein the oligonucleotide comprises at least one modified nucleotide.

28. The RNAi oligonucleotide of claim 27, wherein the modified nucleotide comprises a 2′-modification, optionally wherein the 2′-modification is selected from 2′-fluoro and 2′-O-methyl.

29.-35. (canceled)

36. The RNAi oligonucleotide of claim 28, wherein:
(i) the sense strand comprises 36 nucleotides with positions 1-36 from 5′ to 3′, wherein each of positions 3, 5, 8, 10, 12, 13, 15, and 17 comprise the 2′-fluoro modification, the antisense strand comprises 22 nucleotides with positions 1-22 from 5′ to 3′, and wherein each of positions 2, 3, 4, 7, 10 14, 16 and 19 comprise the 2′-fluoro modification, and the remaining nucleotides comprise the 2′-O-methyl modification; or
(ii) the sense strand comprises 20 nucleotides with positions 1-20 from 5′ to 3′, wherein each of positions 3, 5, 8, 10, 12, 13, 15, and 17 comprise the 2′-fluoro modification, the antisense strand comprises 22 nucleotides with positions 1-22 from 5′ to 3′, and wherein each of positions 2, 3, 4, 7, 10 14, 16 and 19 comprise the 2′-fluoro modification, and the remaining nucleotides comprise the 2′-O-methyl modification.

37.-39. (canceled)

40. The RNAi oligonucleotide of claim 1, wherein the oligonucleotide comprises at least one modified internucleotide linkage, optionally wherein the at least one modified internucleotide linkage is a phosphorothioate linkage.

41. (canceled)

42. The RNAi oligonucleotide of claim 40, wherein the antisense strand comprises the phosphorothioate linkage (i) between positions 1 and 2, and between positions 2 and 3; or (ii) between positions 1 and 2, between positions 2 and 3, and between positions 3 and 4, and wherein positions are numbered 1-4 from 5′ to 3′, optionally wherein the antisense strand is 22 nucleotides in length, and wherein the antisense strand comprises the phosphorothioate linkage between positions 20 and 21 and between positions 21 and 22, and wherein positions are numbered 1-22 from 5′ to 3′.

43. (canceled)

44. The RNAi oligonucleotide of claim 40, wherein the sense strand comprises the phosphorothioate linkage between positions 1 and 2, and wherein positions are numbered 1-2 from 5′ to 3′, optionally wherein the sense strand is 20 nucleotides in length, wherein the sense strand comprises the phosphorothioate linkage between positions between positions 1 and 2, between positions 18 and 19 and between positions 19 and and wherein positions are numbered 1-20 from 5′ to 3′.

45. (canceled)

46. The RNAi oligonucleotide of claim 1, wherein the antisense strand comprises a phosphate analog at 4′-carbon of the sugar of the 5′-nucleotide, optionally wherein the phosphate analog is oxymethyl phosphonate, vinyl phosphonate or malonyl phosphonate, further optionally wherein the phosphate analog is a 4′-phosphate analog comprising 4′-oxymethylphosphonate.

47. (canceled)

48. The RNAi oligonucleotide of claim 1, wherein at least one nucleotide of the oligonucleotide is conjugated to one or more targeting ligands.

49.-52. (canceled)

53. The RNAi oligonucleotide of claim 48, wherein each targeting ligand comprises a N-acetylgalactosamine (GalNAc) moiety, optionally wherein the GalNac moiety is a monovalent GalNAc moiety, a bivalent GalNAc moiety, a trivalent GalNAc moiety, or a tetravalent GalNAc moiety.

54. (canceled)

55. (canceled)

56. The RNAi oligonucleotide of claim 48, wherein the one or more targeting ligands is a lipid moiety, optionally wherein the lipid moiety is conjugated to the 2′ carbon of the ribose ring of the 5′ terminal nucleotide of the sense strand, optionally wherein the lipid moiety is a hydrocarbon chain, and the hydrocarbon chain is a C₈-C₃₀ hydrocarbon chain.

57.-64. (canceled)

65. The RNAi oligonucleotide of claim 1, wherein the sense strand comprises a nucleotide sequence of any one of SEQ ID NOs: 1537-1571, 1607-1641, 1681, 1682, 1865, 1721, 1847, 1846, and 1955.

66. The RNAi oligonucleotide of claim 65, wherein the antisense strand comprises a nucleotide sequence of any one of SEQ ID NOs: 1572-1606 and 1642-1676.

67. The RNAi oligonucleotide of claim 1, wherein the sense strand and the antisense strand comprise nucleotide sequences selected from the group consisting of:
a) SEQ ID NOs: 1537 and 1572, respectively;
b) SEQ ID NOs: 1538 and 1573, respectively;
c) SEQ ID NOs: 1539 and 1574, respectively;
d) SEQ ID NOs: 1540 and 1575, respectively;
e) SEQ ID NOs: 1541 and 1576, respectively;
f) SEQ ID NOs: 1542 and 1577, respectively;
g) SEQ ID NOs: 1543 and 1578, respectively;
h) SEQ ID NOs: 1544 and 1579, respectively;
i) SEQ ID NOs: 1545 and 1580, respectively;
j) SEQ ID NOs: 1546 and 1581, respectively;
k) SEQ ID NOs: 1547 and 1582, respectively;
l) SEQ ID NOs: 1548 and 1583, respectively;
m) SEQ ID NOs: 1549 and 1584, respectively;
n) SEQ ID NOs: 1550 and 1585, respectively;
o) SEQ ID NOs: 1551 and 1586, respectively;
p) SEQ ID NOs: 1552 and 1587, respectively;
q) SEQ ID NOs: 1553 and 1588, respectively;
r) SEQ ID NOs: 1554 and 1589, respectively;
s) SEQ ID NOs: 1555 and 1590, respectively;
t) SEQ ID NOs: 1556 and 1591, respectively;
u) SEQ ID NOs: 1557 and 1592, respectively;
v) SEQ ID NOs: 1558 and 1593, respectively;
w) SEQ ID NOs: 1559 and 1594, respectively;
x) SEQ ID NOs: 1560 and 1595, respectively;
y) SEQ ID NOs: 1561 and 1596, respectively;
z) SEQ ID NOs: 1562 and 1597, respectively;
aa) SEQ ID NOs: 1563 and 1598, respectively;
bb) SEQ ID NOs: 1564 and 1599, respectively;
cc) SEQ ID NOs: 1565 and 1600, respectively;
dd) SEQ ID NOs: 1566 and 1601, respectively;
ee) SEQ ID NOs: 1567 and 1602, respectively;
ff) SEQ ID NOs: 1568 and 1603, respectively;
gg) SEQ ID NOs: 1569 and 1604, respectively;
hh) SEQ ID NOs: 1570 and 1605, respectively;
ii) SEQ ID NOs: 1571 and 1606, respectively; and
jj) SEQ ID NOs: 1681 and 1586, respectively.

68.-82. (canceled)

83. The RNAi oligonucleotide of claim 1, wherein the sense strand and the antisense strand comprise nucleotide sequences selected from the group consisting of:
a) SEQ ID NOs: 1607 and 1642, respectively;
b) SEQ ID NOs: 1608 and 1643, respectively;
c) SEQ ID NOs: 1609 and 1644, respectively;
d) SEQ ID NOs: 1610 and 1645, respectively;
e) SEQ ID NOs: 1611 and 1646, respectively;
f) SEQ ID NOs: 1612 and 1647, respectively;
g) SEQ ID NOs: 1613 and 1648, respectively;
h) SEQ ID NOs: 1614 and 1649, respectively;
i) SEQ ID NOs: 1615 and 1650, respectively;
j) SEQ ID NOs: 1616 and 1651, respectively;
k) SEQ ID NOs: 1617 and 1652, respectively;
l) SEQ ID NOs: 1618 and 1653, respectively;
m) SEQ ID NOs: 1619 and 1654, respectively;
n) SEQ ID NOs: 1620 and 1655, respectively;
o) SEQ ID NOs: 1621 and 1656, respectively;
p) SEQ ID NOs: 1622 and 1657, respectively;
q) SEQ ID NOs: 1623 and 1658, respectively;
r) SEQ ID NOs: 1624 and 1659, respectively;
s) SEQ ID NOs: 1625 and 1660, respectively;
t) SEQ ID NOs: 1626 and 1661, respectively;
u) SEQ ID NOs: 1627 and 1662, respectively;
v) SEQ ID NOs: 1628 and 1663, respectively;
w) SEQ ID NOs: 1629 and 1664, respectively;
x) SEQ ID NOs: 1630 and 1665, respectively;
y) SEQ ID NOs: 1631 and 1666, respectively;
z) SEQ ID NOs: 1632 and 1667, respectively;
aa) SEQ ID NOs: 1633 and 1668, respectively;
bb) SEQ ID NOs: 1634 and 1669, respectively;
cc) SEQ ID NOs: 1635 and 1670, respectively;
dd) SEQ ID NOs: 1636 and 1671, respectively;
ee) SEQ ID NOs: 1637 and 1672, respectively;
ff) SEQ ID NOs: 1638 and 1673, respectively;
gg) SEQ ID NOs: 1639 and 1674, respectively;
hh) SEQ ID NOs: 1640 and 1675, respectively;
ii) SEQ ID NOs: 1641 and 1676, respectively; and
jj) SEQ ID NOs: 1682 and 1656, respectively.

84.-91. (canceled)

92. The RNAi oligonucleotide of claim 1, wherein:
(i) the sense strand comprises the sequence 5′-[mCs][mA][fG][mC][fA][mG][mU][fG][mA][fU][mU][fG][fA][mA][fG][mU][fA][mU][mC][mA][mG][mC][mA][mG][mC][mC][mG][ademA-GalNAc][ademA-GalNAc][ademA-GalNAc][mG][mG][mC][mU][mG][mC]-3′ (SEQ ID NO: 1623), wherein the antisense strand comprises the sequence 5′-[MePhosphonate-4O-mUs][fGs][fA][fU][fA][mC][fU][mU][mC][fA][mA][mU][mC][fA][mC][fU][mG][mC][fU][mGs][mGs][mG]-3′ (SEQ ID NO: 1658);
(ii) the sense strand comprises the sequence 5′-[mAs][mG][fA][mG][fC][mA][mA][fG][mU][fG][mA][fC][fA][mA][fA][mU][fG][mU][mU][mA][mG][mC][mA][mG][mC][mC][mG][ademA-GalNAc][ademA-GalNAc][ademA-GalNAc][mG][mG][mC][mU][mG][mC]-3′ (SEQ ID NO: 1630), wherein the antisense strand comprises the sequence 5′-[MePhosphonate-4O-mUs][fAs][fA][fC][fA][mU][fU][mU][mG][fU][mC][mA][mC][fU][mU][fG][mC][mU][fC][mUs][mGs][mG]-3′ (SEQ ID NO: 1665);
(iii) the sense strand comprises the sequence 5′-[mAs][mG][fU][mC][fA][mU][mG][fA][mC][fA][mU][fU][fU][mC][fU][mC][fA][mA][mA][mA][mG][mC][mA][mG][mC][mC][mG][ademA-GalNAc][ademA-GalNAc][ademA-GalNAc][mG][mG][mC][mU][mG][mC]-3′ (SEQ ID NO: 1634), wherein the antisense strand comprises the sequence 5′-[MePhosphonate-4O-mUs][fUs][fU][fU][fG][mA][fG][mA][mA][fA][mU][mG][mU][fC][mA][fU][mG][mA][fC][mUs][mGs][mG]-3′ (SEQ ID NO: 1669);
(iv) the sense strand comprises the sequence 5′-[mCs][mA][fG][mU][fC][mA][mU][fG][mA][fC][mA][fU][fU][mU][fC][mU][fC][mA][mA][mA][mG][mC][mA][mG][mC][mC][mG][ademA-GalNAc][ademA-GalNAc][ademA-GalNAc][mG][mG][mC][mU][mG][mC]-3′ (SEQ ID NO: 1621), wherein the antisense strand comprises the sequence 5′-[MePhosphonate-4O-mUs][fUs][fU][fG][fA][mG][fA][mA][mA][fU][mG][mU][mC][fA][mU][fG][mA][mC][fU][mGs][mGs][mG]-3′ (SEQ ID NO: 1656);
(v) the sense strand comprises the sequence 5′-[mAs][mG][fU][mU][fG][mU][mU][fA][mG][fU][mG][fA][fU][mU][fU][mG][fC][mU][mA][mA][mG][mC][mA][mG][mC][mC][mG][ademA-GalNAc][ademA-GalNAc][ademA-GalNAc][mG][mG][mC][mU][mG][mC]-3′ (SEQ ID NO: 1640), wherein the antisense strand comprises the sequence 5′-[MePhosphonate-4O-mUs][fUs][fA][fG][fC][mA][fA][mA][mU][fC][mA][mC][mU][fA][mA][fC][mA][mA][fC][mUs][mGs][mG]-3′ (SEQ ID NO: 1675); or
(vi) the sense strand comprises the sequence 5′-[ademCs-C₁₆][mA][fG][mU][fC][mA][mU][fG][mA][fC][mA][fU][fU][mU][fC][mU][fC][mAs][mAs][mA]-3′ (SEQ ID NO: 1682), wherein the antisense strand comprises the sequence 5′-[MePhosphonate-4O-mUs][fUs][fU][fG][fA][mG][fA][mA][mA][fU][mG][mU][mC][fA][mU][fG][mA][mC][fU][mGs][mGs][mG]-3′ (SEQ ID NO: 1656), wherein mC, mA, mG, mU=2′-OMe ribonucleosides; fA, fC, fG, fU=2′-F ribonucleosides; s=phosphorothioate; [ademA-GalNAc]= [chemical structure]
and [ademCs-C₁₆]=cytosine with a phosphorothioate linkage conjugated to C₁₆ hydrocarbon chain.

93.-97. (canceled)

98. A pharmaceutical composition comprising the RNAi oligonucleotide of claim 1, and a pharmaceutically acceptable carrier, delivery agent, or excipient.

99. A method for treating a subject having a disease, disorder, or condition associated with SNCA gene expression, the method comprising administering to the subject a therapeutically effective amount of the RNAi oligonucleotide of claim 1, thereby treating the subject.

100. (canceled)

101. A method for reducing SNCA gene expression in a cell, a population of cells, or a subject, the method comprising the steps of:
i. contacting the cell or the population of cells with the RNAi oligonucleotide of claim 1; or
ii. administering to the subject the RNAi oligonucleotide of claim 1.

102.-114. (canceled)
